(19) United States
(12) Patent Application Publication
(10) Pub. No.: US 2026/0002154 A1
(43) Pub. Date: Jan. 1, 2026

(54) COMPOUNDS AND METHODS FOR REDUCING PRION EXPRESSION

(71) Applicant: Ionis Pharmaceuticals, Inc., Carlsbad, CA (US)

(72) Inventors: Susan M. Freier, San Diego, CA (US); Huynh-Hoa Bui, San Diego, CA (US); Hien Thuy Zhao, San Diego, CA (US)

(73) Assignee: Ionis Pharmaceuticals, Inc., Carlsbad, CA (US)

(21) Appl. No.: 19/047,251

(22) Filed: Feb. 6, 2025

Related U.S. Application Data
(63) Continuation of application No. 17/294,859, filed on May 18, 2021, now Pat. No. 12,281,305.
(60) Provisional application No. 62/770,386, filed on Nov. 21, 2018.

(51) Int. Cl. C12N 15/113; A61K 31/7088

(52) U.S. Cl. CPC C12N 15/113; A61K 31/7088; C12N 2310/14; C12N 2310/31; C12N 2310/315; C12N 2310/321; C12N 2310/322; C12N 2310/3231; C12N 2310/3341; C12N 2310/34; C12N 2310/341; C12N 2310/351; C12N 2320/35

(57) ABSTRACT

Provided are compounds, methods, and pharmaceutical compositions for reducing the amount or activity of PRNP RNA in a cell or animal, and in certain instances reducing the amount of PrP protein in a cell or animal. Such compounds, methods, and pharmaceutical compositions are useful to ameliorate at least one symptom or hallmark of a neurodegenerative disease. Such symptoms and hallmarks spongiform changes in the brain, development of abnormal protein aggregates, neuronal loss, markers of neuronal loss, rapidly progressing dementia, and death. Such neurodegenerative diseases include prion diseases, Creutzfeldt-Jakob disease (CJD), variant Creutzfeldt-Jakob Disease (vCJD), familial Creutzfeldt-Jakob Disease (fCJD), Gerstmann-Straussler-Scheinker syndrome, fatal familial insomnia, kuru, Alzheimer's disease, or Parkinson's disease.

### SEQUENCE LISTING

[0001] The present application is being filed along with a Sequence Listing in electronic format. The Sequence Listing is provided as a file entitled BIOL0345SEQ.xml, created on Apr. 22, 2024, which is 2,560,094 bytes in size. The information in the electronic format of the sequence listing is incorporated herein by reference in its entirety.

### FIELD

[0002] Provided are compounds, methods, and pharmaceutical compositions for reducing the amount of prion RNA (PRNP RNA) in a cell or animal, and in certain instances reducing the amount of prion protein (PrP protein) in a cell or animal. Such compounds, methods, and pharmaceutical compositions are useful to ameliorate at least one symptom or hallmark of a neurodegenerative disease. Such symptoms and hallmarks include spongiform changes in the brain, development of abnormal protein aggregates, neuronal loss, markers of neuronal loss, rapidly progressing dementia, and death. Such neurodegenerative diseases include prion diseases, Creutzfeldt-Jakob disease (CJD), variant Creutzfeldt-Jakob Disease (vCJD), familial Creutzfeldt-Jakob Disease (fCJD), Gerstmann-Straussler-Scheinker syndrome, fatal familial insomnia, kuru, Alzheimer's disease, or Parkinson's disease.

### BACKGROUND

[0003] Prion diseases are a family of rare, progressive, neurodegenerative disorders that affect both humans and non-human animals. Such diseases are caused by the misfolding of the normal prion protein (“PrP^{C}”) and are distinguished by long incubation periods and characteristic spongiform changes associated with neuronal loss (Senesi, et al., “In vivo prion models and the disconnection between transmissibility and neurotoxicity”, Ageing Research Reviews 2017, 36: 156-164; Erana, et al., Biochem. And Biophys. Res. Comm., “Prion-like disorders and Transmissible Spongiform Encephalopathies: An overview of the mechanistic features that are shared by the various disease-related misfolded proteins”, 2017, 483: 1125-1136). Hallmarks of prion diseases include, but are not limited to, spongiform changes in the brain, development of abnormal protein aggregates, neuronal loss, and markers of neuronal loss. Symptoms of prion diseases include, but are not limited to, rapidly progressing dementia, personality changes, ataxia, hallucinations, myoclonus (muscle jerks), chorea, autonomic disturbances, impaired vision, insomnia, blindness, loss of speech, coma, and death.

[0004] Prion protein can occur in several distinct conformational states: a normal cellular form, PrP^{C}, and the protease-resistant scrapie, disease-causing form, hypothesized to represent an ensemble of misfolded conformers, collectively referred to as scrapie or disease-causing prion protein, “PrP^{sc}” (Sensei, 2017). The scrapie form of the prion protein, PrP^{sC}, is the causative agent of transmissible spongiform encephalopathies. Both forms of the protein have the same amino acid sequence, encoded by PRNP RNA, and differ only in how they are folded in three-dimensional space. However, certain mutations in PRNP RNA cause a predisposition of the expressed protein to adopt the folding state of the disease-causing PrP^{sc} (Mastrianni, “The genetics of prion diseases”, Genetic Med., 2010, 12(4):187-195). PrP^{sc} forms aggregates and is resistant to proteolytic degradation by proteinase K. The infectious PrP^{sc} can cause misfolding of normal cellular PrP^{C}, converting it to the proteinase K-resistant PrP^{sc}. This causes an increase in cellular levels of PrP^{sC}, leading to increased protein aggregation as well as spread of the misfolded form throughout the CNS. The patient rapidly develops the characteristic signs and symptoms of prion disease, which is always fatal.

[0005] In addition to prion disease, PrP^{C} has also been implicated as a molecular target in synucleinopathies, such as Parkinson's disease and dementia with Lewy bodies (Ferreira, et. al., “α-synuclein interacts with PrP^{C} to induce cognitive impairment through mGluR5 and NMDAR2B”, Nature Neuroscience, 2017, 20:1569-157) and Alzheimer's disease (Purro, et al., “Alzheimer's”, Biological Psychiatry, 2018, 83(4):358-368).

[0006] Both PrP^{C} and PrP^{sc} can be detected in cerebrospinal fluid (CSF). PrP^{C} can be detected in CSF by standard methods such as western blot. The infectious PrP^{sc} can be detected in the CSF of prion-infected patients via a RT-QuIC test (real-time quaking induced conversion), as described by Orru, et. al., mBio, “Rapid and sensitive RT-QuIC detection of human Creutzfeldt-Jakob disease using cerebrospinal fluid,” 2015, 6(1): e02451-14. This test distinguishes PrP^{sc} from PrP^{C} by the ability of CSF samples to induce the misfolding of a recombinant PrP substrate.

[0007] Currently there is a lack of acceptable options for treating neurodegenerative diseases. It is therefore an object herein to provide compounds, methods, and pharmaceutical compositions for the treatment of such diseases.

### SUMMARY OF THE INVENTION

[0008] Provided herein are compounds, methods and pharmaceutical compositions for reducing the amount or activity of PRNP RNA, and in certain embodiments reducing the amount of PrP protein in a cell or animal. In certain embodiments, the animal has a neurodegenerative disease. In certain embodiments, the neurodegenerative disease is a prion disease, Creutzfeldt-Jakob disease (CJD), variant Creutzfeldt-Jakob Disease (vCJD), familial Creutzfeldt-Jakob Disease (fCJD), Gerstmann-Straussler-Scheinker syndrome (GSS), fatal familial insomnia (FFI), kuru, Alzheimer's disease, or Parkinson's disease. In certain embodiments, compounds useful for reducing expression of PRNP RNA are oligomeric compounds. In certain embodiments, compounds useful for reducing expression of PRNP RNA are modified oligonucleotides.

[0009] Also provided are methods useful for ameliorating at least one symptom or hallmark of a neurodegenerative disease. In certain embodiments, the neurodegenerative disease is a prion disease, Creutzfeldt-Jakob disease (CJD), variant Creutzfeldt-Jakob Disease (vCJD), familial Creutzfeldt-Jakob Disease (fCJD), Gerstmann-Straussler-Scheinker syndrome, fatal familial insomnia, kuru, Alzheimer's disease, or Parkinson's disease. In certain embodiments, the symptom or hallmark includes spongiform changes in the brain, development of abnormal protein aggregates, neuronal loss, markers of neuronal loss, rapidly progressing dementia, and death.

### DETAILED DESCRIPTION OF THE INVENTION

[0010] It is to be understood that both the foregoing general description and the following detailed description are exemplary and explanatory only and are not restrictive. Herein, the use of the singular includes the plural unless specifically stated otherwise. As used herein, the use of “or” means “and/or” unless stated otherwise. Furthermore, the use of the term “including” as well as other forms, such as “includes” and “included”, is not limiting. Also, terms such as “element” or “component” encompass both elements and components comprising one unit and elements and components that comprise more than one subunit, unless specifically stated otherwise.

[0011] The section headings used herein are for organizational purposes only and are not to be construed as limiting the subject matter described. All documents, or portions of documents, cited in this application, including, but not limited to, patents, patent applications, articles, books, and treatises, are hereby expressly incorporated-by-reference for the portions of the document discussed herein, as well as in their entirety.

### Definitions

[0012] Unless specific definitions are provided, the nomenclature used in connection with, and the procedures and techniques of, analytical chemistry, synthetic organic chemistry, and medicinal and pharmaceutical chemistry described herein are those well-known and commonly used in the art. Where permitted, all patents, applications, published applications and other publications and other data referred to throughout in the disclosure are incorporated by reference herein in their entirety.

[0013] Unless otherwise indicated, the following terms have the following meanings:

### Definitions

[0014] As used herein, “2′-deoxynucleoside” means a nucleoside comprising a 2′-H(H) deoxyribosyl sugar moiety, as found in naturally occurring deoxyribonucleic acids (DNA). In certain embodiments, a 2′-deoxynucleoside may comprise a modified nucleobase or may comprise an RNA nucleobase (uracil). Unless otherwise specified, a 2′-deoxynucleoside has the β-D configuration.

[0015] As used herein, “2′-substituted nucleoside” means a nucleoside comprising a 2′-substituted sugar moiety. As used herein, “2′-substituted” in reference to a sugar moiety means a sugar moiety comprising at least one 2′-substituent group other than H or OH.

[0016] As used herein, “5-methyl cytosine” means a cytosine modified with a methyl group attached to the 5 position. A 5-methyl cytosine is a modified nucleobase.

[0017] As used herein, “administering” means providing a pharmaceutical agent to an animal.

[0018] As used herein, “animal” means a human or non-human animal.

[0019] As used herein, “antisense activity” means any detectable and/or measurable change attributable to the hybridization of an antisense compound to its target nucleic acid. In certain embodiments, antisense activity is a decrease in the amount or expression of a target nucleic acid or protein encoded by such target nucleic acid compared to target nucleic acid levels or target protein levels in the absence of the antisense compound.

[0020] As used herein, “antisense compound” means an oligomeric compound capable of achieving at least one antisense activity.

[0021] As used herein, “ameliorate” in reference to a treatment means improvement in at least one symptom relative to the same symptom in the absence of the treatment. In certain embodiments, amelioration is the reduction in the severity or frequency of a symptom or the delayed onset or slowing of progression in the severity or frequency of a symptom. In certain embodiments, the symptom or hallmark is spongiform changes in the brain, development of abnormal protein aggregates, neuronal loss, markers of neuronal loss, rapidly progressing dementia, and death.

[0022] As used herein, “bicyclic nucleoside” or “BNA” means a nucleoside comprising a bicyclic sugar moiety.

[0023] As used herein, “bicyclic sugar” or “bicyclic sugar moiety” means a modified sugar moiety comprising two rings, wherein the second ring is formed via a bridge connecting two of the atoms in the first ring thereby forming a bicyclic structure. In certain embodiments, the first ring of the bicyclic sugar moiety is a furanosyl moiety. In certain embodiments, the bicyclic sugar moiety does not comprise a furanosyl moiety.

[0024] As used herein, “cleavable moiety” means a bond or group of atoms that is cleaved under physiological conditions, for example, inside a cell, an animal, or a human.

[0025] As used herein, “complementary” in reference to an oligonucleotide means that at least 70% of the nucleobases of the oligonucleotide or one or more regions thereof and the nucleobases of another nucleic acid or one or more regions thereof are capable of hydrogen bonding with one another when the nucleobase sequence of the oligonucleotide and the other nucleic acid are aligned in opposing directions. Complementary nucleobases means nucleobases that are capable of forming hydrogen bonds with one another. Complementary nucleobase pairs include adenine (A) and thymine (T), adenine (A) and uracil (U), cytosine (C) and guanine (G), 5-methyl cytosine (^{m}C) and guanine (G). Complementary oligonucleotides and/or nucleic acids need not have nucleobase complementarity at each nucleoside. Rather, some mismatches are tolerated. As used herein, “fully complementary” or “100% complementary” in reference to oligonucleotides means that oligonucleotides are complementary to another oligonucleotide or nucleic acid at each nucleoside of the oligonucleotide.

[0026] As used herein, “conjugate group” means a group of atoms that is directly attached to an oligonucleotide. Conjugate groups include a conjugate moiety and a conjugate linker that attaches the conjugate moiety to the oligonucleotide.

[0027] As used herein, “conjugate linker” means a single bond or a group of atoms comprising at least one bond that connects a conjugate moiety to an oligonucleotide.

[0028] As used herein, “conjugate moiety” means a group of atoms that is attached to an oligonucleotide via a conjugate linker.

[0029] As used herein, “contiguous” in the context of an oligonucleotide refers to nucleosides, nucleobases, sugar moieties, or internucleoside linkages that are immediately adjacent to each other. For example, “contiguous nucleobases” means nucleobases that are immediately adjacent to each other in a sequence.

[0030] As used herein, “constrained ethyl” or “cEt” or “cEt modified sugar” means a β-D ribosyl bicyclic sugar moiety wherein the second ring of the bicyclic sugar is formed via a bridge connecting the 4′-carbon and the 2′-carbon of the β-D ribosyl sugar moiety, wherein the bridge has the formula 4′-CH(CH₃)—O-2′, and wherein the methyl group of the bridge is in the S configuration.

[0031] As used herein, “cEt nucleoside” means a nucleoside comprising cEt modified sugar.

[0032] As used herein, “chirally enriched population” means a plurality of molecules of identical molecular formula, wherein the number or percentage of molecules within the population that contain a particular stereochemical configuration at a particular chiral center is greater than the number or percentage of molecules expected to contain the same particular stereochemical configuration at the same particular chiral center within the population if the particular chiral center were stereorandom. Chirally enriched populations of molecules having multiple chiral centers within each molecule may contain one or more stereorandom chiral centers. In certain embodiments, the molecules are modified oligonucleotides. In certain embodiments, the molecules are compounds comprising modified oligonucleotides.

[0033] As used herein, “gapmer” means a modified oligonucleotide comprising an internal region having a plurality of nucleosides that support RNase H cleavage positioned between external regions having one or more nucleosides, wherein the nucleosides comprising the internal region are chemically distinct from the nucleoside or nucleosides comprising the external regions. The internal region may be referred to as the “gap” and the external regions may be referred to as the “wings.” Unless otherwise indicated, “gapmer” refers to a sugar motif. Unless otherwise indicated, the sugar moieties of the nucleosides of the gap of a gapmer are unmodified 2′-β-D-deoxyribosyl. Thus, the term “MOE gapmer” indicates a gapmer having a sugar motif of 2′-MOE nucleosides in both wings and a gap of 2′-deoxynucleosides. Unless otherwise indicated, a MOE gapmer may comprise one or more modified internucleoside linkages and/or modified nucleobases and such modifications do not necessarily follow the gapmer pattern of the sugar modifications.

[0034] As used herein, “hotspot region” is a range of nucleobases on a target nucleic acid that is amenable to oligomeric compound-mediated reduction of the amount or activity of the target nucleic acid.

[0035] As used herein, “hybridization” means the pairing or annealing of complementary oligonucleotides and/or nucleic acids. While not limited to a particular mechanism, the most common mechanism of hybridization involves hydrogen bonding, which may be Watson-Crick, Hoogsteen or reversed Hoogsteen hydrogen bonding, between complementary nucleobases.

[0036] As used herein, the term “internucleoside linkage” is the covalent linkage between adjacent nucleosides in an oligonucleotide. As used herein “modified internucleoside linkage” means any internucleoside linkage other than a phosphodiester internucleoside linkage. “Phosphorothioate internucleoside linkage” is a modified internucleoside linkage in which one of the non-bridging oxygen atoms of a phosphodiester internucleoside linkage is replaced with a sulfur atom.

[0037] As used herein, “linker-nucleoside” means a nucleoside that links, either directly or indirectly, an oligonucleotide to a conjugate moiety. Linker-nucleosides are located within the conjugate linker of an oligomeric compound. Linker-nucleosides are not considered part of the oligonucleotide portion of an oligomeric compound even if they are contiguous with the oligonucleotide.

[0038] As used herein, “non-bicyclic modified sugar moiety” means a modified sugar moiety that comprises a modification, such as a substituent, that does not form a bridge between two atoms of the sugar to form a second ring.

[0039] As used herein, “mismatch” or “non-complementary” means a nucleobase of a first oligonucleotide that is not complementary with the corresponding nucleobase of a second oligonucleotide or target nucleic acid when the first and second oligonucleotide are aligned.

[0040] As used herein, “MOE” means methoxyethyl. “2′-MOE” or “2′-MOE modified sugar” means a 2′-OCH₂CH₂OCH₃ group in place of the 2′—OH group of a ribosyl sugar moiety. As used herein, “2′-MOE nucleoside” means a nucleoside comprising a 2′-MOE modified sugar.

[0041] As used herein, “motif” means the pattern of unmodified and/or modified sugar moieties, nucleobases, and/or internucleoside linkages, in an oligonucleotide.

[0042] As used herein, “RNA” means an RNA transcript that encodes a protein and includes pre-mRNA and mature mRNA unless otherwise specified.

[0043] As used herein, “neurodegenerative disease” means a condition marked by progressive loss of function or structure, including loss of motor function and death of neurons. In certain embodiments, the neurodegenerative disease is a prion disease. In certain embodiments, the neurodegenerative disease is any of Creutzfeldt-Jakob disease (CJD), variant Creutzfeldt-Jakob Disease (vCJD), familial Creutzfeldt-Jakob Disease (fCJD), Gerstmann-Straussler-Scheinker syndrome, fatal familial insomnia, kuru, Alzheimer's disease, or Parkinson's disease.

[0044] As used herein, “nucleobase” means an unmodified nucleobase or a modified nucleobase. As used herein an “unmodified nucleobase” is adenine (A), thymine (T), cytosine (C), uracil (U), or guanine (G). As used herein, a “modified nucleobase” is a group of atoms other than unmodified A, T, C, U, or G capable of pairing with at least one unmodified nucleobase. A “5-methyl cytosine” is a modified nucleobase. A universal base is a modified nucleobase that can pair with any one of the five unmodified nucleobases. As used herein, “nucleobase sequence” means the order of contiguous nucleobases in a nucleic acid or oligonucleotide independent of any sugar or internucleoside linkage modification.

[0045] As used herein, “nucleoside” means a compound comprising a nucleobase and a sugar moiety. The nucleobase and sugar moiety are each, independently, unmodified or modified. As used herein, “modified nucleoside” means a nucleoside comprising a modified nucleobase and/or a modified sugar moiety. Modified nucleosides include abasic nucleosides, which lack a nucleobase. “Linked nucleosides” are nucleosides that are connected in a contiguous sequence (i.e., no additional nucleosides are presented between those that are linked).

[0046] As used herein, “oligomeric compound” means an oligonucleotide and optionally one or more additional features, such as a conjugate group or terminal group. An oligomeric compound may be paired with a second oligomeric compound that is complementary to the first oligomeric compound or may be unpaired. A “singled-stranded oligomeric compound” is an unpaired oligomeric compound. The term “oligomeric duplex” means a duplex formed by two oligomeric compounds having complementary nucleobase sequences. Each oligomeric compound of an oligomeric duplex may be referred to as a “duplexed oligomeric compound.”

[0047] As used herein, “oligonucleotide” means a strand of linked nucleosides connected via internucleoside linkages, wherein each nucleoside and internucleoside linkage may be modified or unmodified. Unless otherwise indicated, oligonucleotides consist of 8-50 linked nucleosides. As used herein, “modified oligonucleotide” means an oligonucleotide, wherein at least one nucleoside or internucleoside linkage is modified. As used herein, “unmodified oligonucleotide” means an oligonucleotide that does not comprise any nucleoside modifications or internucleoside modifications.

[0048] As used herein, “pharmaceutically acceptable carrier or diluent” means any substance suitable for use in administering to an animal. Certain such carriers enable pharmaceutical compositions to be formulated as, for example, tablets, pills, dragees, capsules, liquids, gels, syrups, slurries, suspension and lozenges for the oral ingestion by a subject.

[0049] In certain embodiments, a pharmaceutically acceptable carrier or diluent is sterile water, sterile saline, sterile buffer solution or sterile artificial cerebrospinal fluid.

[0050] As used herein “pharmaceutically acceptable salts” means physiologically and pharmaceutically parent compound and do not impart undesired toxicological effects thereto.

[0051] As used herein “pharmaceutical composition” means a mixture of substances suitable for administering to a subject. For example, a pharmaceutical composition may comprise an oligomeric compound and a sterile aqueous solution. In certain embodiments, a pharmaceutical composition shows activity in free uptake assay in certain cell lines.

[0052] As used herein “PrP^{C}” means the normal cellular form of PrP protein.

[0053] As used herein “PrP^{sc}” means the protease-resistant, disease-causing form of PrP protein.

[0054] As used herein “prodrug” means a therapeutic agent in a form outside the body that is converted to a different form within an animal or cells thereof. Typically, conversion of a prodrug within the animal is facilitated by the action of an enzymes (e.g., endogenous or viral enzyme) or chemicals present in cells or tissues and/or by physiologic conditions.

[0055] As used herein, “reducing or inhibiting the amount or activity” refers to a reduction or blockade of the transcriptional expression or activity relative to the transcriptional expression or activity in an untreated or control sample and does not necessarily indicate a total elimination of transcriptional expression or activity.

[0056] As used herein, “RNAi compound” means an antisense compound that acts, at least in part, through RISC or Ago2 to modulate a target nucleic acid and/or protein encoded by a target nucleic acid. RNAi compounds include, but are not limited to double-stranded siRNA, single-stranded RNA (ssRNA), and microRNA, including microRNA mimics. In certain embodiments, an RNAi compound modulates the amount, activity, and/or splicing of a target nucleic acid. The term RNAi compound excludes antisense compounds that act through RNase H.

[0057] As used herein, “self-complementary” in reference to an oligonucleotide means an oligonucleotide that at least partially hybridizes to itself.

[0058] As used herein, “siRNA” refers to a ribonucleic acid molecule having a duplex structure including two anti-parallel and substantially complementary nucleic acid strands. The two strands forming the duplex structure may be different portions of one larger RNA molecule, or they may be separate RNA molecules. Where the two strands are part of one larger molecule, and therefore are connected by consecutive nucleobases between the 3′-end of one strand and the 5′ end of the respective other strand forming the duplex structure, the connecting RNA chain is referred to as a “hairpin loop”. The RNA strands may have the same or a different number of nucleotides.

[0059] As used herein, “standard cell assay” means the assay described in Example 1 and reasonable variations thereof.

[0060] As used herein, “stereorandom chiral center” in the context of a population of molecules of identical molecular formula means a chiral center having a random stereochemical configuration. For example, in a population of molecules comprising a stereorandom chiral center, the number of molecules having the (S) configuration of the stereorandom chiral center may be but is not necessarily the same as the number of molecules having the (R) configuration of the stereorandom chiral center. The stereochemical configuration of a chiral center is considered random when it is the results of a synthetic method that is not designed to control the stereochemical configuration. In certain embodiments, a stereorandom chiral center is a stereorandom phosphorothioate internucleoside linkage.

[0061] As used herein, “sugar moiety” means an unmodified sugar moiety or a modified sugar moiety. As used herein, “unmodified sugar moiety” means a 2′-OH(H) ribosyl moiety, as found in RNA (an “unmodified RNA sugar moiety”), or a 2′-H(H) deoxyribosyl moiety, as found in DNA (an “unmodified DNA sugar moiety”). Unmodified sugar moieties have one hydrogen at each of the 1′, 3′, and 4′ positions, an oxygen at the 3′ position, and two hydrogens at the 5′ position. As used herein, “modified sugar moiety” or “modified sugar” means a modified furanosyl sugar moiety or a sugar surrogate.

[0062] As used herein, “sugar surrogate” means a modified sugar moiety having other than a furanosyl moiety that can link a nucleobase to another group, such as an internucleoside linkage, conjugate group, or terminal group in an oligonucleotide. Modified nucleosides comprising sugar surrogates can be incorporated into one or more positions within an oligonucleotide and such oligonucleotides are capable of hybridizing to complementary oligomeric compounds or target nucleic acids.

[0063] As used herein, “symptom or hallmark” means any physical feature or test result that indicates the existence or extent of a disease or disorder. In certain embodiments, a symptom is apparent to a subject or to a medical professional examining or testing said subject. In certain embodiments, a hallmark is apparent upon invasive diagnostic testing, including, but not limited to, post-mortem tests.

[0064] As used herein, “target nucleic acid” and “target RNA” mean a nucleic acid that an antisense compound is designed to affect.

[0065] As used herein, “target region” means a portion of a target nucleic acid to which an oligomeric compound is designed to hybridize.

[0066] As used herein, “terminal group” means a chemical group or group of atoms that is covalently linked to a terminus of an oligonucleotide.

[0067] As used herein, “therapeutically effective amount” means an amount of a pharmaceutical agent that provides a therapeutic benefit to an animal. For example, a therapeutically effective amount improves a symptom of a disease.

### CERTAIN EMBODIMENTS

[0068] The present disclosure provides the following non-limiting numbered embodiments: Embodiment 1. An oligomeric compound comprising a modified oligonucleotide consisting of 12 to 30 linked nucleosides wherein the nucleobase sequence of the modified oligonucleotide is at least 90% complementary to an equal length portion of a PRNP nucleic acid, and wherein the modified oligonucleotide comprises at least one modification selected from a modified sugar, a sugar surrogate, and a modified internucleoside linkage.

[0069] Embodiment 2. An oligomeric compound comprising a modified oligonucleotide consisting of 12 to 30 linked nucleosides and having a nucleobase sequence comprising at least 12, 13, 14, 15, 16, 17, 18, 19, or 20 nucleobases of any of SEQ ID NOS: 27-2744.

[0070] Embodiment 3. An oligomeric compound comprising a modified oligonucleotide consisting of 12 to 30 linked nucleosides and having a nucleobase sequence comprising at least 12, 13, 14, 15, 16, 17, 18, or 19 nucleobases of any of SEQ ID NOS: 2745-2766.

[0071] Embodiment 4. An oligomeric compound comprising a modified oligonucleotide consisting of 12 to 30 linked nucleosides and having a nucleobase sequence comprising at least 12, 13, 14, 15, 16, 17, or 18 nucleobases of any of SEQ ID NOS: 2767-2780.

[0072] Embodiment 5. An oligomeric compound comprising a modified oligonucleotide consisting of 12 to 30 linked nucleosides and having a nucleobase sequence comprising at least 12, 13, 14, 15, 16, or 17 nucleobases of any of SEQ ID NOS: 2781-2802.

[0073] Embodiment 6. An oligomeric compound comprising a modified oligonucleotide consisting of 12 to 30 linked nucleosides and having a nucleobase sequence comprising at least 12, 13, 14, 15, or 16 nucleobases of any of SEQ ID NOS: 2803-2806.

[0074] Embodiment 7. An oligomeric compound comprising a modified oligonucleotide consisting of 12 to 30 linked nucleosides and having a nucleobase sequence comprising a portion of at least 8, at least 9, at least 10, at least 11, at least 12, at least 13, at least 14, at least 15, at least 16, at least 17, at least 18, at least 19, or at least 20 contiguous nucleobases, wherein the portion is complementary to:
[0075] an equal length portion of nucleobases 5,635-5,677 of SEQ ID NO: 2;
[0076] an equal length portion of nucleobases 5,791-5,826 of SEQ ID NO: 2; or
[0077] an equal length portion of nucleobases 14,366-14,410 of SEQ ID NO: 2.

[0078] Embodiment 8. An oligomeric compound comprising a modified oligonucleotide consisting of 12 to 30 linked nucleosides and having a nucleobase sequence comprising at least 8, at least 9, at least 10, at least 11, at least 12, at least 13, at least 14, at least 15, at least 16, at least 17, or at least 18 contiguous nucleobases of a nucleobase sequence selected from:
[0079] SEQ ID Nos: 530, 607, 684, 761, 838, 915, 1914, 1992, 2069, 2146, 2237, 2301, 2302, 2536, 2640, 2750, 2759, 2760, 2764, 2788-2793, 2803-2806;
[0080] SEQ ID Nos: 1225, 1302, 1379, 1456, 2240, 2307, 2308, 2383, 2471, 2537, 2568, 2647, 2736-2739, 2798-2801; or
[0081] SEQ ID Nos: 555, 632, 709, 786, 863, 940, 1017, 1862, 1939, 2017, 2094, 2171, 2257, 2334, 2407, 2408, 2488, 2508, 2543, 2612, 2659, 2677, 2757, 2766, 2794-2797.

[0082] Embodiment 9. An oligomeric compound comprising a modified oligonucleotide consisting of 12 to 30 linked nucleosides and having a nucleobase sequence comprising a portion of at least 8, at least 9, at least 10, at least 11, at least 12, at least 13, at least 14, at least 15, at least 16, at least 17, at least 18, at least 19, or at least 20 contiguous nucleobases, wherein the portion is complementary to:
[0083] an equal length portion of nucleobases 4,902-4,929 of SEQ ID NO: 2;
[0084] an equal length portion of nucleobases 5,000-5,026 of SEQ ID NO: 2;
[0085] an equal length portion of nucleobases 5,073-5,100 of SEQ ID NO: 2;
[0086] an equal length portion of nucleobases 5,515-5,559 of SEQ ID NO: 2;
[0087] an equal length portion of nucleobases 5,595-5,632 of SEQ ID NO: 2;
[0088] an equal length portion of nucleobases 5,666-5,690 of SEQ ID NO: 2;
[0089] an equal length portion of nucleobases 5,857-5,881 of SEQ ID NO: 2;
[0090] an equal length portion of nucleobases 9,352-9,377 of SEQ ID NO: 2;
[0091] an equal length portion of nucleobases 11,331-11,358 of SEQ ID NO: 2;
[0092] an equal length portion of nucleobases 16,292-16,328 of SEQ ID NO: 2;
[0093] an equal length portion of nucleobases 17,120-17,151 of SEQ ID NO: 2;
[0094] an equal length portion of nucleobases 17,211-17,241 of SEQ ID NO: 2;
[0095] an equal length portion of nucleobases 17,281-17,331 of SEQ ID NO: 2;
[0096] an equal length portion of nucleobases 17,410-17,445 of SEQ ID NO: 2;
[0097] an equal length portion of nucleobases 17,601-17,641 of SEQ ID NO: 2;
[0098] an equal length portion of nucleobases 17,635-17,670 of SEQ ID NO: 2;
[0099] an equal length portion of nucleobases 17,663-17,712 of SEQ ID NO: 2;
[0100] an equal length portion of nucleobases 17,753-17,781 of SEQ ID NO: 2; or
[0101] an equal length portion of nucleobases 17,985-18,016 of SEQ ID NO: 2.

[0102] Embodiment 10. The oligomeric compound of any of embodiments 1-9, wherein the modified oligonucleotide has a nucleobase sequence that is at least 80%, 85%, 90%, 95%, or 100% complementary to the nucleobase sequences of SEQ ID NO: 1, SEQ ID NO: 2, SEQ ID NO: 3, or SEQ ID NO: 4 when measured across the entire nucleobase sequence of the modified oligonucleotide.

[0103] Embodiment 11. The oligomeric compound of any of embodiments 1-10, wherein the modified oligonucleotide comprises at least one modified nucleoside.

[0104] Embodiment 12. The oligomeric compound of embodiment 11, wherein the modified oligonucleotide comprises at least one modified nucleoside comprising a modified sugar moiety.

[0105] Embodiment 13. The oligomeric compound of embodiment 12, wherein the modified oligonucleotide comprises at least one modified nucleoside comprising a bicyclic sugar moiety.

[0106] Embodiment 14. The oligomeric compound of embodiment 13, wherein the modified oligonucleotide comprises at least one modified nucleoside comprising a bicyclic sugar moiety having a 2′-4′ bridge, wherein the 2′-4′ bridge is selected from —O—CH₂—; and —O—CH(CH₃)—.

[0107] Embodiment 15. The oligomeric compound of any of embodiments 11-14, wherein the modified oligonucleotide comprises at least one modified nucleoside comprising a non-bicyclic modified sugar moiety.

[0108] Embodiment 16. The oligomeric compound of embodiment 17, wherein the modified oligonucleotide comprises at least one modified nucleoside comprising a non-bicyclic modified sugar moiety comprising a 2′-MOE modified sugar or 2′-OMe modified sugar.

[0109] Embodiment 17. The oligomeric compound of any of embodiments 11-16, wherein the modified oligonucleotide comprises at least one modified nucleoside comprising a sugar surrogate.

[0110] Embodiment 18. The oligomeric compound of embodiment 15, wherein the modified oligonucleotide comprises at least one modified nucleoside comprising a sugar surrogate selected from morpholino and PNA.

[0111] Embodiment 19. The oligomeric compound of any of embodiments 1-12 or 15-18, wherein the modified oligonucleotide does not comprise a bicyclic sugar moiety.

[0112] Embodiment 20. The oligomeric compound of any of embodiments 1-19, wherein the modified oligonucleotide has a sugar motif comprising:
[0113] a 5′-region consisting of 1-7 linked 5′-region nucleosides;
[0114] a central region consisting of 6-10 linked central region nucleosides; and
[0115] a 3′-region consisting of 1-7 linked 3′-region nucleosides; wherein
[0116] each of the 5′-region nucleosides and each of the 3′-region nucleosides comprises a modified sugar
[0117] and each of the central region nucleosides comprises a 2′-deoxyribosyl sugar.

[0118] Embodiment 21. The oligomeric compound of embodiment 20, wherein the modified oligonucleotide has a 5′-region consisting of 4 linked 5′-region nucleosides;
[0119] a central region consisting of 8 linked central region nucleosides; and
[0120] a 3′-region consisting of 4 linked 3′-region nucleosides; wherein
[0121] each of the 5′-region nucleosides comprises a 2′-MOE modified sugar, each of the 3′-region nucleosides comprises either a 2′-MOE modified sugar or a cEt modified sugar, and each of the central region nucleosides comprises a 2′-deoxyribosyl sugar.

[0122] Embodiment 22. The oligomeric compound of embodiment 20, wherein the modified oligonucleotide has a 5′-region consisting of 4 linked 5′-region nucleosides;
[0123] a central region consisting of 8 linked central region nucleosides; and
[0124] a 3′-region consisting of 5 linked 3′-region nucleosides; wherein
[0125] each of the 5′-region nucleosides comprises a 2′-MOE modified sugar, each of the 3′-region nucleosides comprises either a 2′-MOE modified sugar or a cEt modified sugar, and each of the central region nucleosides comprises a 2′-deoxyribosyl sugar.

[0126] Embodiment 23. The oligomeric compound of embodiment 20, wherein the modified oligonucleotide has a 5′-region consisting of 5 linked 5′-region nucleosides;
[0127] a central region consisting of 8 linked central region nucleosides; and
[0128] a 3′-region consisting of 5 linked 3′-region nucleosides; wherein
[0129] each of the 5′-region and each of the 3′-region nucleosides comprises a 2′-MOE modified sugar, and each of the central region nucleosides comprises a 2′-deoxyribosyl sugar.

[0130] Embodiment 24. The oligomeric compound of embodiment 20, wherein the modified oligonucleotide has a 5′-region consisting of 5 linked 5′-region nucleosides;
[0131] a central region consisting of 9 linked central region nucleosides; and
[0132] a 3′-region consisting of 5 linked 3′-region nucleosides; wherein
[0133] each of the 3′-region nucleosides comprises either a 2′-MOE modified sugar or a cEt modified sugar, and each of the central region nucleosides comprises a 2′-deoxyribosyl sugar.

[0134] Embodiment 25. The oligomeric compound of embodiment 20, wherein the modified oligonucleotide has a 5′-region consisting of 5 linked 5′-region nucleosides;
[0135] a central region consisting of 9 linked central region nucleosides; and
[0136] a 3′-region consisting of 5 linked 3′-region nucleosides; wherein
[0137] each of the 5′-region nucleosides and each of the 3′-region nucleosides comprises a 2′-MOE modified sugar, and each of the central region nucleosides comprises a 2′-deoxyribosyl sugar.

[0138] Embodiment 26. The oligomeric compound of embodiment 20, wherein the modified oligonucleotide has a sugar motif comprising:
[0139] a 5′-region consisting of 6 linked 5′-region nucleosides;
[0140] a central region consisting of 10 linked central region nucleosides; and
[0141] a 3′-region consisting of 4 linked 3′-region nucleosides; wherein
[0142] each of the 5′-region nucleosides and each of the 3′-region nucleosides comprises a 2′-MOE modified sugar, and each of the central region nucleosides comprises a 2′-deoxyribosyl sugar.

[0143] Embodiment 27. The oligomeric compound of embodiment 20, wherein the modified oligonucleotide has a sugar motif comprising:
[0144] a 5′-region consisting of 6 linked 5′-region nucleosides;
[0145] a central region consisting of 10 linked central region nucleosides; and
[0146] a 3′-region consisting of 4 linked 3′-region nucleosides; wherein
[0147] each of the 3′-region nucleosides comprises either a 2′-MOE modified sugar or a cEt modified sugar, and each of the central region nucleosides comprises a 2′-deoxyribosyl sugar.

[0148] Embodiment 28. The oligomeric compound of embodiment 20, wherein the modified oligonucleotide has a sugar motif comprising:
[0149] a 5′-region consisting of 5 linked 5′-region nucleosides;
[0150] a central region consisting of 10 linked central region nucleosides; and
[0151] a 3′-region consisting of 5 linked 3′-region nucleosides; wherein
[0152] each of the 5′-region nucleosides and each of the 3′-region nucleosides comprises a 2′-MOE modified sugar, and each of the central region nucleosides comprises a 2′-deoxyribosyl sugar.

[0153] Embodiment 29. The oligomeric compound of embodiment 20, wherein the modified oligonucleotide has a sugar motif comprising:
[0154] a 5′-region consisting of 5 linked 5′-region nucleosides;
[0155] a central region consisting of 10 linked central region nucleosides; and
[0156] a 3′-region consisting of 5 linked 3′-region nucleosides; wherein
[0157] each of the 3′-region nucleosides comprises either a 2′-MOE modified sugar or a cEt modified sugar, and each of the central region nucleosides comprises a 2′-deoxyribosyl sugar.

[0158] Embodiment 30. The oligomeric compound of embodiment 20, wherein the modified oligonucleotide has a sugar motif comprising:
[0159] a 5′-region consisting of 4 linked 5′-region nucleosides;
[0160] a central region consisting of 10 linked central region nucleosides; and
[0161] a 3′-region consisting of 6 linked 3′-region nucleosides; wherein
[0162] each of the 5′-region nucleosides and each of the 3′-region nucleosides comprises a 2′-MOE modified sugar, and each of the central region nucleosides comprises a 2′-deoxyribosyl sugar.

[0163] Embodiment 31. The oligomeric compound of embodiment 20, wherein the modified oligonucleotide has a 5′-region consisting of 3 linked 5′-region nucleosides;
[0164] a central region consisting of 10 linked central region nucleosides; and
[0165] a 3′-region consisting of 7 linked 3′-region nucleosides; wherein
[0166] each of the 5′-region nucleosides and each of the 3′-region nucleosides comprises a 2′-MOE modified sugar, and each of the central region nucleosides comprises a 2′-deoxyribosyl sugar.

[0167] Embodiment 32. The oligomeric compound of embodiment 20, wherein the modified oligonucleotide has a 5′-region consisting of 7 linked 5′-region nucleosides;
[0168] a central region consisting of 10 linked central region nucleosides; and
[0169] a 3′-region consisting of 3 linked 3′-region nucleosides; wherein
[0170] each of the 5′-region nucleosides and each of the 3′-region nucleosides comprises a 2′-MOE modified sugar, and each of the central region nucleosides comprises a 2′-deoxyribosyl sugar.

[0171] Embodiment 33. The oligomeric compound of any of embodiments 20-32, wherein the 2′-deoxyribosyl sugar is a 2′-β-D-deoxyribosyl sugar.

[0172] Embodiment 34. The oligomeric compound of any of embodiments 1-19, wherein the modified oligonucleotide has a sugar motif comprising:
[0173] a 5′-region consisting of 1-6 linked 5′-region nucleosides;
[0174] a central region consisting of 6-10 linked central region nucleosides; and
[0175] a 3′-region consisting of 1-6 linked 3′-region nucleosides; wherein
[0176] each of the 5′-region nucleosides and each of the 3′-region nucleosides comprises a modified sugar, and the central region has the following formula:

[chemical structure]

[0177] wherein Nx is a 2′-OMe nucleoside and each Nd is a 2′-β-D-deoxynucleoside;
[0178] and n is from 6 to 8.

[0179] Embodiment 35. The oligomeric compound of embodiment 34, wherein the modified oligonucleotide has a sugar motif comprising:
[0180] a 5′-region consisting of 5 linked 5′-region nucleosides;
[0181] a central region consisting of 8 linked central region nucleosides; and
[0182] a 3′-region consisting of 5 linked 3′-region nucleosides; wherein
[0183] each of the 5′-region nucleosides and each of the 3′-region nucleosides comprises a 2′-MOE modified sugar,
[0184] and the central region has the following formula:

[chemical structure]

[0185] wherein Nx is a nucleoside comprising a 2′-OMe sugar and each Nd is a nucleoside comprising s a 2′-deoxyribosyl sugar;
[0186] and n is 6.

[0187] Embodiment 36. The oligomeric compound of embodiment 34, wherein the modified oligonucleotide has a sugar motif comprising:
[0188] a 5′-region consisting of 5 linked 5′-region nucleosides;
[0189] a central region consisting of 8 linked central region nucleosides; and
[0190] a 3′-region consisting of 5 linked 3′-region nucleosides; wherein
[0191] each of the 5′-region nucleosides and each of the 3′-region nucleosides comprises a 2′-MOE modified sugar,
[0192] and the central region has the following formula:

[chemical structure]

[0193] wherein Nx is a nucleoside comprising a 2′-OMe sugar and each Nd is a nucleoside comprising s a 2′-deoxyribosyl sugar;
[0194] and n is 6.

[0195] Embodiment 37. The oligomeric compound of embodiment 34, wherein the modified oligonucleotide has a sugar motif comprising:
[0196] a 5′-region consisting of 5 linked 5′-region nucleosides;
[0197] a central region consisting of 10 linked central region nucleosides; and
[0198] a 3′-region consisting of 5 linked 3′-region nucleosides; wherein
[0199] each of the 5′-region nucleosides and each of the 3′-region nucleosides comprises a 2′-MOE modified sugar,
[0200] and the central region has the following formula:

[chemical structure]

[0201] wherein Nx is a nucleoside comprising a 2′-OMe sugar and each Nd is a nucleoside comprising s a 2′-deoxyribosyl sugar;
[0202] and n is 8.

[0203] Embodiment 38. The oligomeric compound of any of embodiments 34-37, wherein the 2′-deoxyribosyl sugar is a 2′-β-D-deoxyribosyl sugar.

[0204] Embodiment 39. The oligomeric compound of any of embodiments 1-38, wherein the modified oligonucleotide comprises at least one modified internucleoside linkage.

[0205] Embodiment 40. The oligomeric compound of embodiment 39, wherein each internucleoside linkage of the modified oligonucleotide is a modified internucleoside linkage.

[0206] Embodiment 41. The oligomeric compound of embodiment 39 or 40 wherein at least one internucleoside linkage is a phosphorothioate internucleoside linkage.

[0207] Embodiment 42. The oligomeric compound of embodiment 39 or 41 wherein the modified oligonucleotide comprises at least one phosphodiester internucleoside linkage.

[0208] Embodiment 43. The oligomeric compound of any of embodiments 39, 41, or 42, wherein each internucleoside linkage is independently selected from a phosphodiester internucleoside linkage or a phosphorothioate internucleoside linkage.

[0209] Embodiment 44. The oligomeric compound of any of embodiments 1-43, wherein the modified oligonucleotide comprises at least one modified nucleobase.

[0210] Embodiment 45. The oligomeric compound of embodiment 44, wherein the modified nucleobase is a 5-methyl cytosine.

[0211] Embodiment 46. The oligomeric compound of any of embodiments 1-45, wherein the modified oligonucleotide consists of 12-30, 12-22, 12-20, 14-20, 15-25, 16-20, 18-22 or 18-20 linked nucleosides.

[0212] Embodiment 47. The oligomeric compound of any of embodiments 1-21, 33, 34, or 38-46 wherein the modified oligonucleotide consists of 16 linked nucleosides.

[0213] Embodiment 48. The oligomeric compound of any of embodiments 1-20, 22, 33, 34, or 38-46 wherein the modified oligonucleotide consists of 17 linked nucleosides.

[0214] Embodiment 49. The oligomeric compound of any of embodiments 1-20, 23, 33, 34-36 or 38-46 wherein the modified oligonucleotide consists of 18 linked nucleosides.

[0215] Embodiment 50. The oligomeric compound of any of embodiments 1-20, 24, 25, 33, 34, or 38-46 wherein the modified oligonucleotide consists of 19 linked nucleosides.

[0216] Embodiment 51. The oligomeric compound of any of embodiments 1-20, 26-34, or 37-46, wherein the modified oligonucleotide consists of 20 linked nucleosides.

[0217] Embodiment 52. The oligomeric compound of embodiment 39, wherein the modified oligonucleotide has the internucleoside linkage motif soossssssssssooooss, sooossssssssssoooss, sooosssssssssssooss, sooooossssssssssoss, ssooooossssssssssos, soooossssssssssoos, soooosssssssssooss, soosssssssssooss, sooosssssssssooss, or soosssssssssoos wherein “s” represents a phosphorothioate internucleoside linkage and “o” represents a phosphodiester internucleoside linkage.

[0218] Embodiment 53. The oligomeric compound of any of embodiments 1-52, consisting of the modified oligonucleotide.

[0219] Embodiment 54. The oligomeric compound of any of embodiments 1-52, comprising a conjugate group comprising a conjugate moiety and a conjugate linker.

[0220] Embodiment 55. The oligomeric compound of embodiment 54, wherein the conjugate group comprises a GalNAc cluster comprising 1-3 GalNAc ligands.

[0221] Embodiment 56. The oligomeric compound of embodiments 54 or 55, wherein the conjugate linker consists of a single bond.

[0222] Embodiment 57. The oligomeric compound of embodiment 54, wherein the conjugate linker is cleavable.

[0223] Embodiment 58. The oligomeric compound of embodiment 54, wherein the conjugate linker comprises 1-3 linker-nucleosides.

[0224] Embodiment 59. The oligomeric compound of any of embodiments 54-58, wherein the conjugate group is attached to the modified oligonucleotide at the 5′-end of the modified oligonucleotide.

[0225] Embodiment 60. The oligomeric compound of any of embodiments 54-58, wherein the conjugate group is attached to the modified oligonucleotide at the 3′-end of the modified oligonucleotide.

[0226] Embodiment 61. The oligomeric compound of any of embodiments 1-60 comprising a terminal group.

[0227] Embodiment 62. The oligomeric compound of any of embodiments 1-61 wherein the oligomeric compound is a singled-stranded oligomeric compound.

[0228] Embodiment 63. The oligomeric compound of any of embodiments 1-57 or 59-62, wherein the oligomeric compound does not comprise linker-nucleosides.

[0229] Embodiment 64. An oligomeric duplex comprising an oligomeric compound of any of embodiments 1-61 or 63.

[0230] Embodiment 65. An antisense compound comprising or consisting of an oligomeric compound of any of embodiments 1-63 or an oligomeric duplex of embodiment 64.

[0231] Embodiment 66. A pharmaceutical composition comprising an oligomeric compound of any of embodiments 1-63 or an oligomeric duplex of embodiment 64 and a pharmaceutically acceptable carrier or diluent.

[0232] Embodiment 67. The pharmaceutical composition of embodiment 66, comprising a pharmaceutically acceptable diluent, wherein the pharmaceutically acceptable diluent is phosphate-buffered saline or artificial cerebrospinal fluid.

[0233] Embodiment 68. The pharmaceutical composition of embodiment 67, wherein the pharmaceutical composition consists essentially of the modified oligonucleotide and phosphate-buffered saline or artificial cerebrospinal fluid.

[0234] Embodiment 69. A method comprising administering to an animal a pharmaceutical composition of any of embodiments 66-68.

[0235] Embodiment 70. A method of treating a disease associated with PRNP comprising administering to an individual having or at risk for developing a disease associated with PRNP a therapeutically effective amount of a pharmaceutical composition according to any of embodiments 66-68; and thereby treating the disease associated with PRNP.

[0236] Embodiment 71. A method of reducing PrP protein in the CSF of an individual having or at risk for developing a disease associated with PRNP a therapeutically effective amount of a pharmaceutical composition according any of embodiments 66-68; and thereby reducing PrP protein in the CSF.

[0237] Embodiment 72. The method of embodiment 71, wherein the PrP protein is PrP^{C}.

[0238] Embodiment 73. The method of embodiment 71, wherein the PrP protein is PrP^{sc}

[0239] Embodiment 74. The method of embodiment 71, wherein the PrP protein is both PrP^{C} and PrP^{sc}

[0240] Embodiment 75. The method of embodiment 70 or 71, wherein the administering is by intrathecal administration.

[0241] Embodiment 76. The method of embodiment 70 or embodiment 71, wherein the disease associated with PRNP is a neurodegenerative disease.

[0242] Embodiment 77. The method of embodiment 76, wherein the neurodegenerative disease is selected from among prion diseases, Creutzfeldt-Jakob disease (CJD), variant Creutzfeldt-Jakob Disease (vCJD), familial Creutzfeldt-Jakob Disease (fCJD), Gerstmann-Straussler-Scheinker syndrome, fatal familial insomnia, kuru, Alzheimer's disease, or Parkinson's disease.

[0243] Embodiment 78. The method of any of embodiments 70-77, wherein at least one symptom or hallmark of the neurodegenerative disease is ameliorated.

[0244] Embodiment 79. The method of embodiment 78, wherein the symptom or hallmark is any of spongiform changes in the brain, development of abnormal protein aggregates, neuronal loss, markers of neuronal loss, rapidly progressing dementia, or death.

[0245] Embodiment 80. A method of reducing PRNP RNA in a cell comprising contacting the cell with an oligomeric compound according to any of embodiments 1-63, an oligomeric duplex according to embodiment 64, or an antisense compound according to embodiment 65; and thereby reducing PRNP RNA in the cell.

[0246] Embodiment 81. A method of reducing PrP protein in a cell comprising contacting the cell with an oligomeric compound according to any of embodiments 1-63, an oligomeric duplex according to embodiment 64, or an antisense compound according to embodiment 65; and thereby reducing PrP in the cell.

[0247] Embodiment 82. The method of embodiment 81, wherein the PrP protein is PrP^{C}.

[0248] Embodiment 83. The method of embodiment 81, wherein the PrP protein is PrP^{sc}

[0249] Embodiment 84. The method of embodiment 81, wherein the PrP protein is both PrP^{C} and PrP^{sc}

[0250] Embodiment 85. The method of any of embodiments 80-84, wherein the cell is in an animal.

[0251] Embodiment 86. A modified oligonucleotide according to the following chemical structure:

[chemical structure]

or a salt thereof.

[0252] Embodiment 87. A modified oligonucleotide according to the following chemical structure:

[chemical structure]

[0253] Embodiment 88. A modified oligonucleotide according to the following chemical structure:

[chemical structure]

or a salt thereof.

[0254] Embodiment 89. A modified oligonucleotide according to the following chemical structure:

[chemical structure]

[0255] Embodiment 90. A modified oligonucleotide according to the following chemical structure:

[chemical structure]

or a salt thereof.

[0256] Embodiment 91. A modified oligonucleotide according to the following chemical structure:

[chemical structure]

[0257] Embodiment 92. A modified oligonucleotide according to the following chemical structure:

[chemical structure]

or a salt thereof.

[0258] Embodiment 93. A modified oligonucleotide according to the following chemical structure:

[chemical structure]

[0259] Embodiment 94. A modified oligonucleotide according to the following chemical structure:

[chemical structure]

or a salt thereof.

[0260] Embodiment 95. A modified oligonucleotide according to the following chemical structure:

[chemical structure]

[0261] Embodiment 96. A modified oligonucleotide according to the following chemical structure:

[chemical structure]

or a salt thereof.

[0262] Embodiment 97. A modified oligonucleotide according to the following chemical structure:

[chemical structure]

[0263] Embodiment 98. The modified oligonucleotide of embodiment 86, 88, 90, 92, 94, or 96 which is a sodium salt of the chemical structure.

[0264] Embodiment 99. A compound comprising a modified oligonucleotide according to the following chemical notation: Ges Teo ^{m}Ceo Aeo Tes Ads Ads Tds Tds Tds Tds ^{m}Cds Tds Tds Ads Geo ^{m}Ceo Tes Aes ^{m}Ce (SEQ ID NO: 2808), wherein,
[0265] A=an adenine nucleobase,
[0266] ^{m}C=a 5-methyl cytosine nucleobase,
[0267] G=a guanine nucleobase,
[0268] T=a thymine nucleobase,
[0269] e=a 2′-MOE modified sugar,
[0270] d=a 2′-β-D deoxyribosyl sugar,
[0271] s=a phosphorothioate internucleoside linkage, and
[0272] o=a phosphodiester internucleoside linkage.

[0273] Embodiment 100. A compound comprising a modified oligonucleotide according to the following chemical notation: Ges Teo ^{m}Ceo Aeo Teo Aeo Ads Tds Tds Tds Tds ^{m}Cds Tds Tds Ads Gds ^{m}Ceo Tes Aes ^{m}Ce (SEQ ID NO: 2809), wherein,
[0274] A=an adenine nucleobase,
[0275] ^{m}C=a 5-methyl cytosine nucleobase,
[0276] G=a guanine nucleobase,
[0277] T=a thymine nucleobase,
[0278] e=a 2′-MOE modified sugar,
[0279] d=a 2′-β-D deoxyribosyl sugar,
[0280] s=a phosphorothioate internucleoside linkage, and
[0281] o=a phosphodiester internucleoside linkage.

[0282] Embodiment 101. A compound comprising a modified oligonucleotide according to the following chemical notation: Ges ^{m}Ceo Teo Teo Aeo Teo Tds Ads Tds Tds ^{m}Cds Ads Tds Gds Tds Tds ^{m}Ceo Tes ^{m}Ces ^{m}Ce (SEQ ID NO: 2810), wherein,
[0283] A=an adenine nucleobase,
[0284] ^{m}C=a 5-methyl cytosine nucleobase,
[0285] G=a guanine nucleobase,
[0286] T=a thymine nucleobase,
[0287] e=a 2′-MOE modified sugar,
[0288] d=a 2′-β-D deoxyribosyl sugar,
[0289] s=a phosphorothioate internucleoside linkage, and
[0290] o=a phosphodiester internucleoside linkage.

[0291] Embodiment 102. A compound comprising a modified oligonucleotide according to the following chemical notation: Ges Teo Geo Teo ^{m}Ceo Aeo Tds Ads Ads Tds Tds Tds Tds ^{m}Cds Tds Tds Aeo Ges ^{m}Ces Te (SEQ ID NO: 2811), wherein,
[0292] A=an adenine nucleobase,
[0293] ^{m}C=a 5-methyl cytosine nucleobase,
[0294] G=a guanine nucleobase,
[0295] T=a thymine nucleobase,
[0296] e=a 2′-MOE modified sugar,
[0297] d=a 2′-β-D deoxyribosyl sugar,
[0298] s=a phosphorothioate internucleoside linkage, and
[0299] o=a phosphodiester internucleoside linkage.

[0300] Embodiment 103. A compound comprising a modified oligonucleotide according to the following chemical notation: Ges Teo ^{m}Ceo Aeo Teo Ads Ads Tds Tds Tds Tds ^{m}Cds Tds Tds Aes Geo ^{m}Ceo Tes Ae (SEQ ID NO: 2807), wherein,
[0301] A=an adenine nucleobase,
[0302] ^{m}C=a 5-methyl cytosine nucleobase,
[0303] G=a guanine nucleobase,
[0304] T=a thymine nucleobase,
[0305] e=a 2′-MOE modified sugar,
[0306] d=a 2′-β-D deoxyribosyl sugar,
[0307] s=a phosphorothioate internucleoside linkage, and
[0308] o=a phosphodiester internucleoside linkage.

[0309] Embodiment 104. A compound comprising a modified oligonucleotide according to the following chemical notation: Aes ^{m}Ceo Geo Teo ^{m}Ces ^{m}Cds Ads Tds Tds Tds Tds ^{m}Cds Tds Gds Tds Geo ^{m}Ceo Tes Tes Te (SEQ ID NO: 2812), wherein,
[0310] A=an adenine nucleobase,
[0311] ^{m}C=a 5-methyl cytosine nucleobase,
[0312] G=a guanine nucleobase,
[0313] T=a thymine nucleobase,
[0314] e=a 2′-MOE modified sugar,
[0315] d=a 2′-β-D deoxyribosyl sugar,
[0316] s=a phosphorothioate internucleoside linkage, and
[0317] o=a phosphodiester internucleoside linkage.

[0318] Embodiment 105. The compound of any of embodiments 99-104, comprising the modified oligonucleotide covalently linked to a conjugate group.

[0319] Embodiment 106. A chirally enriched population of modified oligonucleotides of any of embodiments 86-105, wherein the population is enriched for modified oligonucleotides comprising at least one particular phosphorothioate internucleoside linkage having a particular stereochemical configuration.

[0320] Embodiment 107. The chirally enriched population of embodiment 106, wherein the population is enriched for modified oligonucleotides comprising at least one particular phosphorothioate internucleoside linkage having the (Sp) or (Rp) configuration.

[0321] Embodiment 108. The chirally enriched population of embodiment 106, wherein the population is enriched for modified oligonucleotides having a particular, independently selected stereochemical configuration at each phosphorothioate internucleoside linkage

[0322] Embodiment 109. The chirally enriched population of embodiment 106, wherein the population is enriched for modified oligonucleotides having the (Sp) or (Rp) configuration at each phosphorothioate internucleoside linkage.

[0323] Embodiment 110. The chirally enriched population of embodiment 106, wherein the population is enriched for modified oligonucleotides having the (Rp) configuration at one particular phosphorothioate internucleoside linkage and the (Sp) configuration at each of the remaining phosphorothioate internucleoside linkages.

[0324] Embodiment 111. The chirally enriched population of embodiment 106 or embodiment 108 wherein the population is enriched for modified oligonucleotides having at least 3 contiguous phosphorothioate internucleoside linkages in the Sp, Sp, and Rp configurations, in the 5′ to 3′ direction.

[0325] Embodiment 112. A population of modified oligonucleotides of any of embodiments 86-105, wherein all of the phosphorothioate internucleoside linkages of the modified oligonucleotide are stereorandom.

[0326] Embodiment 113. A pharmaceutical composition comprising the population of modified oligonucleotides of any of embodiments 106-112 and a pharmaceutically acceptable carrier or diluent.

[0327] Embodiment 114. A pharmaceutical composition of any of embodiments 86-105, and a pharmaceutically acceptable diluent or carrier.

[0328] Embodiment 115. The pharmaceutical composition of embodiment 114, comprising a pharmaceutically acceptable diluent, wherein the pharmaceutically acceptable diluent is phosphate-buffered saline or artificial cerebrospinal fluid.

[0329] Embodiment 116. The pharmaceutical composition of embodiment 115, wherein the pharmaceutical composition consists essentially of the modified oligonucleotide and phosphate-buffered saline or artificial cerebrospinal fluid.

### I. Certain Oligonucleotides

[0330] In certain embodiments, provided herein are oligomeric compounds comprising oligonucleotides, which consist of linked nucleosides. Oligonucleotides may be unmodified oligonucleotides (RNA or DNA) or may be modified oligonucleotides. Modified oligonucleotides comprise at least one modification relative to unmodified RNA or DNA. That is, modified oligonucleotides comprise at least one modified nucleoside (comprising a modified sugar moiety and/or a modified nucleobase) and/or at least one modified internucleoside linkage.

### A. Certain Modified Nucleosides

[0331] Modified nucleosides comprise a modified sugar moiety or a modified nucleobase or both a modified sugar moiety and a modified nucleobase.

### 1. Certain Sugar Moieties

[0332] In certain embodiments, modified sugar moieties are non-bicyclic modified sugar moieties. In certain embodiments, modified sugar moieties are bicyclic or tricyclic sugar moieties. In certain embodiments, modified sugar moieties are sugar surrogates. Such sugar surrogates may comprise one or more substitutions corresponding to those of other types of modified sugar moieties.

[0333] In certain embodiments, modified sugar moieties are non-bicyclic modified sugar moieties comprising a furanosyl ring with one or more substituent groups none of which bridges two atoms of the furanosyl ring to form a bicyclic structure. Such non bridging substituents may be at any position of the furanosyl, including but not limited to substituents at the 2′, 4′, and/or 5′ positions. In certain embodiments one or more non-bridging substituent of non-bicyclic modified sugar moieties is branched. Examples of 2′-substituent groups suitable for non-bicyclic modified sugar moieties include but are not limited to: 2′-F, 2′-OCH₃ (“OMe” or “O-methyl”), and 2′-O(CH₂)₂OCH₃ (“MOE”). In certain embodiments, 2′-substituent groups are selected from among: halo, allyl, amino, azido, SH, CN, OCN, CF₃, OCF₃, O—C₁-C₁₀ alkoxy, O—C₁-C₁₀ substituted alkoxy, O—C₁-C₁₀ alkyl, O—C₁-C₁₀ substituted alkyl, S-alkyl, N(Rₘ)-alkyl, O-alkenyl, S-alkenyl, N(Rₘ)-alkenyl, O-alkynyl, S-alkynyl, N(Rₘ)-alkynyl, O-alkylenyl-O-alkyl, alkynyl, alkaryl, aralkyl, O-alkaryl, O-aralkyl, O(CH₂)₂SCH₃, O(CH₂)₂ON(Rₘ)(Rₙ) or OCH₂C(═O)—N(Rₘ)(Rₙ), where each Rₘ and Rₙ is, independently, H, an amino protecting group, or substituted or unsubstituted C₁-C₁₀ alkyl, and the 2′-substituent groups described in Cook et al., U.S. Pat. No. 6,531,584; Cook et al., U.S. Pat. No. 5,859,221; and Cook et al., U.S. Pat. No. 6,005,087. Certain embodiments of these 2′-substituent groups can be further substituted with one or more substituent groups independently selected from among: hydroxyl, amino, alkoxy, carboxy, benzyl, phenyl, nitro (NO₂), thiol, thioalkoxy, thioalkyl, halogen, alkyl, aryl, alkenyl and alkynyl. Examples of 4′-substituent groups suitable for non-bicyclic modified sugar moieties include but are not limited to alkoxy (e.g., methoxy), alkyl, and those described in Manoharan et al., WO 2015/106128. Examples of 5′-substituent groups suitable for non-bicyclic modified sugar moieties include but are not limited to: 5-methyl (R or S), 5′-vinyl, and 5′-methoxy. In certain embodiments, non-bicyclic modified sugar moieties comprise more than one non-bridging sugar substituent, for example, 2′-F-5′-methyl sugar moieties and the modified sugar moieties and modified nucleosides described in Migawa et al., WO 2008/101157 and Rajeev et al., US2013/0203836.).

[0334] In certain embodiments, a 2′-substituted non-bicyclic modified nucleoside comprises a sugar moiety comprising a non-bridging 2′-substituent group selected from: F, NH₂, N₃, OCF₃, OCH₃, O(CH₂)₃NH₂, CH₂CH═CH₂, OCH₂CH═CH₂, OCH₂CH₂OCH₃, O(CH₂)₂SCH₃, O(CH₂)₂ON(Rₘ)(Rₙ), O(CH₂)₂O(CH₂)₂N(CH₃)₂, and N-substituted acetamide (OCH₂C(═O)—N(Rₘ)(Rₙ)), where each Rₘ and Rₙ is, independently, H, an amino protecting group, or substituted or unsubstituted C₁-C₁₀ alkyl.

[0335] In certain embodiments, a 2′-substituted nucleoside non-bicyclic modified nucleoside comprises a sugar moiety comprising a non-bridging 2′-substituent group selected from: F, OCF₃, OCH₃, OCH₂CH₂OCH₃, O(CH₂)₂SCH₃, O(CH₂)₂ON(CH₃)₂, O(CH₂)₂O(CH₂)₂N(CH₃)₂, and OCH₂C(═O)—N(H)CH₃ (“NMA”).

[0336] In certain embodiments, a 2′-substituted non-bicyclic modified nucleoside comprises a sugar moiety comprising a non-bridging 2′-substituent group selected from: F, OCH₃, and OCH₂CH₂OCH₃.

[0337] Certain modified sugar moieties comprise a substituent that bridges two atoms of the furanosyl ring to form a second ring, resulting in a bicyclic sugar moiety. In certain such embodiments, the bicyclic sugar moiety comprises a bridge between the 4′ and the 2′ furanose ring atoms. Examples of such 4′ to 2′ bridging sugar substituents include but are not limited to: 4′-CH₂—2′, 4′—(CH₂)₂-2′, 4′—(CH₂)₃-2′, 4′-CH₂—O-2′ (“LNA”), 4′-CH₂—S-2′, 4′—(CH₂)₂-O-2′ (“ENA”), 4′-CH(CH₃)—O-2′ (referred to as “constrained ethyl” or “cEt”), 4′-CH₂—O—CH₂—2′, 4′-CH₂—N(R)-2′, 4′-CH(CH₂OCH₃)—O-2′ (“constrained MOE” or “cMOE”) and analogs thereof (see, e.g., Seth et al., U.S. Pat. No. 7,399,845, Bhat et al., U.S. Pat. No. 7,569,686, Swayze et al., U.S. Pat. No. 7,741,457, and Swayze et al., U.S. Pat. No. 8,022,193), 4′-C(CH₃)(CH₃)—O-2′ and analogs thereof (see, e.g., Seth et al., U.S. Pat. No. 8,278,283), 4′-CH₂—N(OCH₃)-2′ and analogs thereof (see, e.g., Prakash et al., U.S. Pat. No. 8,278,425), 4′-CH₂—O—N(CH₃)—2′ (see, e.g., Allerson et al., U.S. Pat. No. 7,696,345 and Allerson et al., U.S. Pat. No. 8,124,745), 4′-CH₂—C(H)(CH₃)—2′ (see, e.g., Zhou, et al., J. Org. Chem.,2009, 74, 118-134), 4′-CH₂—C(═CH₂)-2′ and analogs thereof (see e.g., Seth et al., U.S. Pat. No. 8,278,426), 4′-C(RₐR_{b})—N(R)—O-2′, 4′—C(RₐR_{b})—O—N(R)-2′, 4′-CH₂—O—N(R)-2′, and 4′-CH₂—N(R)—O-2′, wherein each R, Rₐ, and R_{b} is, independently, H, a protecting group, or C₁-C₁₂ alkyl (see, e.g. Imanishi et al., U.S. Pat. No. 7,427,672).

[0338] In certain embodiments, such 4′ to 2′ bridges independently comprise from 1 to 4 linked groups independently selected from: —[C(Rₐ)(R_{b})]n—, —[C(Rₐ)(R_{b})]ₙO—, —C(Rₐ)═C(R_{b})—, —C(Rₐ)═N—, —C(═NRₐ)—, —C(═O)—, —C(═S)—, —O—, —Si(Rₐ)₂—, —S(═O)ₓ—, and —N(Rₐ)—;
[0339] wherein:
[0340] x is 0, 1, or 2;
[0341] n is 1, 2, 3, or 4;
[0342] each Rₐ and R_{b} is, independently, H, a protecting group, hydroxyl, C₁-C₁₂ alkyl, substituted C₁-C₁₂ alkyl, C₂-C₁₂ alkenyl, substituted C₂-C₁₂ alkenyl, C₂-C₁₂ alkynyl, substituted C₂-C₁₂ alkynyl, C₅-C₂₀ aryl, substituted C₅-C₂₀ aryl, heterocycle radical, substituted heterocycle radical, heteroaryl, substituted heteroaryl, C₅-C₇ alicyclic radical, substituted C₅-C₇ alicyclic radical, halogen, OJ₁, NJ₁J₂, SJ₁, N₃, COOJ₁, acyl (C(═O)—H), substituted acyl, CN, sulfonyl (S(═O)₂-J₁), or sulfoxyl (S(═O)-J₁); and
[0343] each J₁ and J₂ is, independently, H, C₁-C₁₂ alkyl, substituted C₁-C₁₂ alkyl, C₂-C₁₂ alkenyl, substituted C₂-C₁₂ alkenyl, C₂-C₁₂ alkynyl, substituted C₂-C₁₂ alkynyl, C₅-C₂₀ aryl, substituted C₅-C₂₀ aryl, acyl (C(═O)—H), substituted acyl, a heterocycle radical, a substituted heterocycle radical, C₁-C₁₂ aminoalkyl, substituted C₁-C₁₂ aminoalkyl, or a protecting group.

[0344] Additional bicyclic sugar moieties are known in the art, see, for example: Freier et al., Nucleic Acids Research, 1997, 25(22), 4429-4443, Albaek et al., J Org. Chem., 2006, 71, 7731-7740, Singh et al., Chem. Commun., 1998, 4, 455-456; Koshkin et al., Tetrahedron, 1998, 54, 3607-3630; Kumar et al., Bioorg. Med. Chem. Lett., 1998, 8, 2219-2222; Singh et al., J. Org. Chem., 1998, 63, 10035-10039; Srivastava et al., J Am. Chem. Soc., 20017, 129, 8362-8379;Wengel et a., U.S. Pat. No. 7,053,207; Imanishi et al., U.S. Pat. No. 6,268,490; Imanishi et al. U.S. Pat. No. 6,770,748; Imanishi et al., U.S. RE44,779; Wengel et al., U.S. Pat. No. 6,794,499; Wengel et al., U.S. Pat. No. 6,670,461; Wengel et al., U.S. Pat. No. 7,034,133; Wengel et al., U.S. Pat. No. 8,080,644; Wengel et al., U.S. Pat. No. 8,034,909; Wengel et al., U.S. Pat. No. 8,153,365; Wengel et al., U.S. Pat. No. 7,572,582; and Ramasamy et al., U.S. Pat. No. 6,525,191; Torsten et al., WO 2004/106356;Wengel et al., WO 1999/014226; Seth et al., WO 2007/134181; Seth et al., U.S. Pat. No. 7,547,684; Seth et al., U.S. Pat. No. 7,666,854; Seth et al., U.S. Pat. No. 8,088,746; Seth et al., U.S. Pat. No. 7,750,131; Seth et al., U.S. Pat. No. 8,030,467; Seth et al., U.S. Pat. No. 8,268,980; Seth et al., U.S. Pat. No. 8,546,556; Seth et al., U.S. Pat. No. 8,530,640; Migawa et al., U.S. Pat. No. 9,012,421; Seth et al., U.S. Pat. No. 8,501,805; and U.S. Patent Publication Nos. Allerson et al., US2008/0039618 and Migawa et al., US2015/0191727.

[0345] In certain embodiments, bicyclic sugar moieties and nucleosides incorporating such bicyclic sugar moieties are further defined by isomeric configuration. For example, an LNA nucleoside (described herein) may be in the α-L configuration or in the β-D configuration.

[chemical structure]

α-L-methyleneoxy (4′-CH₂—O-2′) or α-L-LNA bicyclic nucleosides have been incorporated into oligonucleotides that showed antisense activity (Frieden et al., Nucleic Acids Research, 2003, 21, 6365-6372). Herein, general descriptions of bicyclic nucleosides include both isomeric configurations. When the positions of specific bicyclic nucleosides (e.g., LNA or cEt) are identified in exemplified embodiments herein, they are in the β-D configuration, unless otherwise specified.

[0346] In certain embodiments, modified sugar moieties comprise one or more non-bridging sugar substituent and one or more bridging sugar substituent (e.g., 5′-substituted and 4′-2′ bridged sugars).

[0347] In certain embodiments, modified sugar moieties are sugar surrogates. In certain such embodiments, the oxygen atom of the sugar moiety is replaced, e.g., with a sulfur, carbon or nitrogen atom. In certain such embodiments, such modified sugar moieties also comprise bridging and/or non-bridging substituents as described herein. For example, certain sugar surrogates comprise a 4′-sulfur atom and a substitution at the 2′-position (see, e.g., Bhat et al., U.S. Pat. No. 7,875,733 and Bhat et al., U.S. Pat. No. 7,939,677) and/or the 5′ position.

[0348] In certain embodiments, sugar surrogates comprise rings having other than 5 atoms. For example, in certain embodiments, a sugar surrogate comprises a six-membered tetrahydropyran (“THP”). Such tetrahydropyrans may be further modified or substituted. Nucleosides comprising such modified tetrahydropyrans include but are not limited to hexitol nucleic acid (“HNA”), anitol nucleic acid (“ANA”), manitol nucleic acid (“NINA”) (see, e.g., Leumann, C J. Bioorg. & Med. Chem. 2002, 10, 841-854), fluoro HNA:

[chemical structure]

(“F-HNA”, see e.g. Swayze et al., U.S. Pat. No. 8,088,904; Swayze et al., U.S. Pat. No. 8,440,803; Swayze et al., U.S. Pat. No. 8,796,437; and Swayze et al., U.S. Pat. No. 9,005,906; F-HNA can also be referred to as a F-THP or 3′-fluoro tetrahydropyran), and nucleosides comprising additional modified THP compounds having the formula:

[chemical structure]

wherein, independently, for each of said modified THP nucleoside:
[0349] Bx is a nucleobase moiety;
[0350] T₃ and T₄ are each, independently, an internucleoside linking group linking the modified THP nucleoside to the remainder of an oligonucleotide or one of T₃ and T₄ is an internucleoside linking group linking the modified THP nucleoside to the remainder of an oligonucleotide and the other of T₃ and T₄ is H, a hydroxyl protecting group, a linked conjugate group, or a 5′ or 3′-terminal group;
[0351] q₁, q₂, q₃, q₄, q₅, q₆ and q₇ are each, independently, H, C₁-C₆ alkyl, substituted C₁-C₆ alkyl, C₂-C₆ alkenyl, substituted C₂-C₆ alkenyl, C₂-C₆ alkynyl, or substituted C₂-C₆ alkynyl; and
[0352] each of R₁ and R₂ is independently selected from among: hydrogen, halogen, substituted or unsubstituted alkoxy, NJ₁J₂, SJ₁, N₃, OC(═X)J₁, OC(═X)NJ₁J₂, NJ₃C(═X)NJ₁J₂, and CN, wherein X is 0, S or NJ₁, and each J₁, J₂, and J₃ is, independently, H or C₁-C₆ alkyl.

[0353] In certain embodiments, modified THP nucleosides are provided wherein q₁, q₂, q₃, q₄, q₅, q₆ and q₇ are each H.

[0354] In certain embodiments, at least one of q₁, q₂, q₃, q₄, q₅, q₆ and q₇ is other than H. In certain embodiments, at least one of q₁, q₂, q₃, q₄, q₅, q₆ and q₇ is methyl. In certain embodiments, modified THP nucleosides are provided wherein one of R₁ and R₂is F. In certain embodiments, R₁ is F and R₂is H, in certain embodiments, R₁ is methoxy and R₂ is H, and in certain embodiments, R₁ is methoxyethoxy and R₂ is H.

[0355] In certain embodiments, sugar surrogates comprise rings having more than 5 atoms and more than one heteroatom. For example, nucleosides comprising morpholino sugar moieties and their use in oligonucleotides have been reported (see, e.g., Braasch et al., Biochemistry, 2002, 41, 4503-4510 and Summerton et al., U.S. Pat. No. 5,698,685; Summerton et al., U.S. Pat. No. 5,166,315; Summerton et al., U.S. Pat. No. 5,185,444; and Summerton et al., U.S. Pat. No. 5,034,506). As used here, the term “morpholino” means a sugar surrogate having the following structure:

[chemical structure]

In certain embodiments, morpholinos may be modified, for example by adding or altering various substituent groups from the above morpholino structure. Such sugar surrogates are referred to herein as “modified morpholinos.”

[0356] In certain embodiments, sugar surrogates comprise acyclic moieties. Examples of nucleosides and oligonucleotides comprising such acyclic sugar surrogates include but are not limited to: peptide nucleic acid (“PNA”), acyclic butyl nucleic acid (see, e.g., Kumar et al., Org. Biomol. Chem., 2013, 11, 5853-5865), and nucleosides and oligonucleotides described in Manoharan et al., WO2011/133876.

[0357] Many other bicyclic and tricyclic sugar and sugar surrogate ring systems are known in the art that can be used in modified nucleosides.

### 2. Certain Modified Nucleobases

[0358] In certain embodiments, modified oligonucleotides comprise one or more nucleoside comprising an unmodified nucleobase. In certain embodiments, modified oligonucleotides comprise one or more nucleoside comprising a modified nucleobase. In certain embodiments, modified oligonucleotides comprise one or more nucleoside that does not comprise a nucleobase, referred to as an abasic nucleoside.

[0359] In certain embodiments, modified nucleobases are selected from: 5-substituted pyrimidines, 6-azapyrimidines, alkyl or alkynyl substituted pyrimidines, alkyl substituted purines, and N-2, N-6 and 0-6 substituted purines. In certain embodiments, modified nucleobases are selected from: 2-aminopropyladenine, 5-hydroxymethyl cytosine, xanthine, hypoxanthine, 2-aminoadenine, 6-N-methylguanine, 6-N-methyladenine, 2-propyladenine, 2-thiouracil, 2-thiothymine and 2-thiocytosine, 5-propynyl (—C═C—CH₃) uracil, 5-propynylcytosine, 6-azouracil, 6-azocytosine, 6-azothymine, 5-ribosyluracil (pseudouracil), 4-thiouracil, 8-halo, 8-amino, 8-thiol, 8-thioalkyl, 8-hydroxyl, 8-aza and other 8-substituted purines, 5-halo, particularly 5-bromo, 5-trifluoromethyl, 5-halouracil, and 5-halocytosine, 7-methylguanine, 7-methyladenine, 2-F-adenine, 2-aminoadenine, 7-deazaguanine, 7-deazaadenine, 3-deazaguanine, 3-deazaadenine, 6-N-benzoyladenine, 2-N-isobutyrylguanine, 4-N-benzoylcytosine, 4-N-benzoyluracil, 5-methyl 4-N-benzoylcytosine, 5-methyl 4-N-benzoyluracil, universal bases, hydrophobic bases, promiscuous bases, size-expanded bases, and fluorinated bases. Further modified nucleobases include tricyclic pyrimidines, such as 1,3-diazaphenoxazine-2-one, 1,3-diazaphenothiazine-2-one and 9-(2-aminoethoxy)-1,3-diazaphenoxazine-2-one (G-clamp). Modified nucleobases may also include those in which the purine or pyrimidine base is replaced with other heterocycles, for example 7-deaza-adenine, 7-deazaguanosine, 2-aminopyridine and 2-pyridone. Further nucleobases include those disclosed in Merigan et al., U.S. Pat. No. 3,687,808, those disclosed in The Concise Encyclopedia Of Polymer Science And Engineering, Kroschwitz, J. I., Ed., John Wiley & Sons, 1990, 858-859; Englisch et al., Angewandte Chemie, International Edition, 1991, 30, 613; Sanghvi, Y. S., Chapter 15, Antisense Research and Applications, Crooke, S. T. and Lebleu, B., Eds., CRC Press, 1993, 273-288; and those disclosed in Chapters 6 and 15, Antisense Drug Technology, Crooke S. T., Ed., CRC Press, 2008, 163-166 and 442-443.

[0360] Publications that teach the preparation of certain of the above noted modified nucleobases as well as other modified nucleobases include without limitation, Manoharan et al., US2003/0158403; Manoharan et al., US2003/0175906; Dinh et al., U.S. Pat. No. 4,845,205; Spielvogel et al., U.S. Pat. No. 5,130,302; Rogers et al., U.S. Pat. No. 5,134,066; Bischofberger et al., U.S. Pat. No. 5,175,273; Urdea et al., U.S. Pat. No. 5,367,066; Benner et al., U.S. Pat. No. 5,432,272; Matteucci et al., U.S. Pat. No. 5,434,257; Gmeiner et al., U.S. Pat. No. 5,457,187; Cook et al., U.S. Pat. No. 5,459,255; Froehler et al., U.S. Pat. No. 5,484,908; Matteucci et al., U.S. Pat. No. 5,502,177; Hawkins et al., U.S. Pat. No. 5,525,711; Haralambidis et al., U.S. Pat. No. 5,552,540; Cook et al., U.S. Pat. No. 5,587,469; Froehler et al., U.S. Pat. No. 5,594,121; Switzer et al., U.S. Pat. No. 5,596,091; Cook et al., U.S. Pat. No. 5,614,617; Froehler et al., U.S. Pat. No. 5,645,985; Cook et al., U.S. Pat. No. 5,681,941; Cook et al., U.S. Pat. No. 5,811,534; Cook et al., U.S. Pat. No. 5,750,692; Cook et al., U.S. Pat. No. 5,948,903; Cook et al., U.S. Pat. No. 5,587,470; Cook et al., U.S. Pat. No. 5,457,191; Matteucci et al., U.S. Pat. No. 5,763,588; Froehler et al., U.S. Pat. No. 5,830,653; Cook et al., U.S. Pat. No. 5,808,027; Cook et al., 6,166,199; and Matteucci et al., U.S. Pat. No. 6,005,096.

### 3. Certain Modified Internucleoside Linkages

[0361] In certain embodiments, nucleosides of modified oligonucleotides may be linked together using any internucleoside linkage. The two main classes of internucleoside linking groups are defined by the presence or absence of a phosphorus atom. Representative phosphorus-containing internucleoside linkages include but are not limited to phosphates, which contain a phosphodiester bond (“P═O”) (also referred to as unmodified or naturally occurring linkages), phosphotriesters, methylphosphonates, phosphoramidates, and phosphorothioates (“P═S”), and phosphorodithioates (“HS—P═S”). Representative non-phosphorus containing internucleoside linking groups include but are not limited to methylenemethylimino (—CH₂—N(CH₃)—O—CH₂—), thiodiester, thionocarbamate (—O—C(═O)(NH)—S—); siloxane (—O—SiH₂—O—); and N,N′-dimethylhydrazine (—CH₂—N(CH₃)—N(CH₃)—). Modified internucleoside linkages, compared to naturally occurring phosphate linkages, can be used to alter, typically increase, nuclease resistance of the oligonucleotide. In certain embodiments, internucleoside linkages having a chiral atom can be prepared as a racemic mixture, or as separate enantiomers. Methods of preparation of phosphorous-containing and non-phosphorous-containing internucleoside linkages are well known to those skilled in the art.

[0362] Representative internucleoside linkages having a chiral center include but are not limited to alkylphosphonates and phosphorothioates. Modified oligonucleotides comprising internucleoside linkages having a chiral center can be prepared as populations of modified oligonucleotides comprising stereorandom internucleoside linkages, or as populations of modified oligonucleotides comprising phosphorothioate linkages in particular stereochemical configurations. In certain embodiments, populations of modified oligonucleotides comprise phosphorothioate internucleoside linkages wherein all of the phosphorothioate internucleoside linkages are stereorandom. Such modified oligonucleotides can be generated using synthetic methods that result in random selection of the stereochemical configuration of each phosphorothioate linkage. Nonetheless, as is well understood by those of skill in the art, each individual phosphorothioate of each individual oligonucleotide molecule has a defined stereoconfiguration. In certain embodiments, populations of modified oligonucleotides are enriched for modified oligonucleotides comprising one or more particular phosphorothioate internucleoside linkages in a particular, independently selected stereochemical configuration. In certain embodiments, the particular configuration of the particular phosphorothioate linkage is present in at least 65% of the molecules in the population. In certain embodiments, the particular configuration of the particular phosphorothioate linkage is present in at least 70% of the molecules in the population. In certain embodiments, the particular configuration of the particular phosphorothioate linkage is present in at least 80% of the molecules in the population. In certain embodiments, the particular configuration of the particular phosphorothioate linkage is present in at least 90% of the molecules in the population. In certain embodiments, the particular configuration of the particular phosphorothioate linkage is present in at least 99% of the molecules in the population. Such chirally enriched populations of modified oligonucleotides can be generated using synthetic methods known in the art, e.g., methods described in Oka et al., JACS 125, 8307 (2003), Wan et al. Nuc. Acid. Res. 42, 13456 (2014), and WO 2017/015555. In certain embodiments, a population of modified oligonucleotides is enriched for modified oligonucleotides having at least one indicated phosphorothioate in the (Sp) configuration. In certain embodiments, a population of modified oligonucleotides is enriched for modified oligonucleotides having at least one phosphorothioate in the (Rp) configuration. In certain embodiments, modified oligonucleotides comprising (Rp) and/or (Sp) phosphorothioates comprise one or more of the following formulas, respectively, wherein “B” indicates a nucleobase:

[chemical structure]

Unless otherwise indicated, chiral internucleoside linkages of modified oligonucleotides described herein can be stereorandom or in a particular stereochemical configuration.

[0363] Neutral internucleoside linkages include, without limitation, phosphotriesters, methylphosphonates, MMI (3′-CH₂—N(CH₃)—O—5′), amide-3 (3′—CH₂—C(═O)—N(H)-5′), amide-4 (3′—CH₂—N(H)—C(═O)-5′), formacetal (3′-O—CH₂—O—5′), methoxypropyl, and thioformacetal (3′—S—CH₂—O—5′). Further neutral internucleoside linkages include nonionic linkages comprising siloxane (dialkylsiloxane), carboxylate ester, carboxamide, sulfide, sulfonate ester and amides (See for example: Carbohydrate Modifications in Antisense Research; Y. S. Sanghvi and P. D. Cook, Eds., ACS Symposium Series 580; Chapters 3 and 4, 40-65). Further neutral internucleoside linkages include nonionic linkages comprising mixed N, O, S and CH₂ component parts.

### B. Certain Motifs

[0364] In certain embodiments, modified oligonucleotides comprise one or more modified nucleosides comprising a modified sugar moiety. In certain embodiments, modified oligonucleotides comprise one or more modified nucleosides comprising a modified nucleobase. In certain embodiments, modified oligonucleotides comprise one or more modified internucleoside linkage. In such embodiments, the modified, unmodified, and differently modified sugar moieties, nucleobases, and/or internucleoside linkages of a modified oligonucleotide define a pattern or motif. In certain embodiments, the patterns of sugar moieties, nucleobases, and internucleoside linkages are each independent of one another. Thus, a modified oligonucleotide may be described by its sugar motif, nucleobase motif and/or internucleoside linkage motif (as used herein, nucleobase motif describes the modifications to the nucleobases independent of the sequence of nucleobases).

### 1. Certain Sugar Motifs

[0365] In certain embodiments, oligonucleotides comprise one or more type of modified sugar and/or unmodified sugar moiety arranged along the oligonucleotide or region thereof in a defined pattern or sugar motif. In certain instances, such sugar motifs include but are not limited to any of the sugar modifications discussed herein.

[0366] In certain embodiments, modified oligonucleotides comprise or consist of a region having a gapmer motif, which is defined by two external regions or “wings” and a central or internal region or “gap.” The three regions of a gapmer motif (the 5′-wing, the gap, and the 3′-wing) form a contiguous sequence of nucleosides wherein at least some of the sugar moieties of the nucleosides of each of the wings differ from at least some of the sugar moieties of the nucleosides of the gap. Specifically, at least the sugar moieties of the nucleosides of each wing that are closest to the gap (the 3′-most nucleoside of the 5′-wing and the 5′-most nucleoside of the 3′-wing) differ from the sugar moiety of the neighboring gap nucleosides, thus defining the boundary between the wings and the gap (i.e., the wing/gap junction). In certain embodiments, the sugar moieties within the gap are the same as one another. In certain embodiments, the gap includes one or more nucleoside having a sugar moiety that differs from the sugar moiety of one or more other nucleosides of the gap. In certain embodiments, the sugar motifs of the two wings are the same as one another (symmetric gapmer). In certain embodiments, the sugar motif of the 5′-wing differs from the sugar motif of the 3′-wing (asymmetric gapmer).

[0367] In certain embodiments, the wings of a gapmer comprise 1-5 nucleosides. In certain embodiments, the wings of a gapmer comprise 6 or 7 nucleosides. In certain embodiments, each nucleoside of each wing of a gapmer is a modified nucleoside. In certain embodiments, at least one nucleoside of each wing of a gapmer is a modified nucleoside. In certain embodiments, at least two nucleosides of each wing of a gapmer are modified nucleosides. In certain embodiments, at least three nucleosides of each wing of a gapmer are modified nucleosides. In certain embodiments, at least four nucleosides of each wing of a gapmer are modified nucleosides.

[0368] In certain embodiments, the gap of a gapmer comprises 7-12 nucleosides. In certain embodiments, each nucleoside of the gap of a gapmer is an unmodified 2′-deoxynucleoside. In certain embodiments, at least one nucleoside of the gap of a gapmer is a modified nucleoside. In certain embodiments, at least one nucleoside of the gap of a gapmer comprises a 2′-deoxyfuranosyl sugar moiety that has an isomeric configuration other than the β-3-D-ribosyl configuration.

[0369] In certain embodiments, the gapmer is a deoxy gapmer. In certain embodiments, the nucleosides on the gap side of each wing/gap junction are unmodified 2′-deoxynucleosides and the nucleosides on the wing sides of each wing/gap junction are modified nucleosides. In certain embodiments, each nucleoside of the gap is an unmodified 2′-deoxynucleoside. In certain embodiments, each nucleoside of each wing of a gapmer is a modified nucleoside.

[0370] In certain embodiments, modified oligonucleotides comprise or consist of a region having a fully modified sugar motif. In such embodiments, each nucleoside of the fully modified region of the modified oligonucleotide comprises a modified sugar moiety. In certain embodiments, each nucleoside of the entire modified oligonucleotide comprises a modified sugar moiety. In certain embodiments, modified oligonucleotides comprise or consist of a region having a fully modified sugar motif, wherein each nucleoside within the fully modified region comprises the same modified sugar moiety, referred to herein as a uniformly modified sugar motif. In certain embodiments, a fully modified oligonucleotide is a uniformly modified oligonucleotide. In certain embodiments, each nucleoside of a uniformly modified comprises the same 2′-modification.

[0371] Herein, the lengths (number of nucleosides) of the three regions of a gapmer may be provided using the notation [# of nucleosides in the 5′-wing]-[# of nucleosides in the gap]-[# of nucleosides in the 3′-wing]. Thus, a 5-10-5 gapmer consists of 5 linked nucleosides in each wing and 10 linked nucleosides in the gap. Where such nomenclature is followed by a specific modification, that modification is the modification in each sugar of each wing and the gap nucleosides comprise unmodified deoxynucleosides. Thus, a 5-10-5 MOE gapmer consists of 5 linked 2′-MOE modified nucleosides in the 5′-wing, 10 linked deoxynucleosides in the gap, and 5 linked 2′-MOE nucleosides in the 3′-wing. In certain such embodiments, the deoxynucleosides in the gap comprise a 2′-β-D-deoxyribosyl sugar. A mixed wing gapmer has at least two different modified sugars in the 5′ and/or 3′ wing.

[0372] In certain embodiments, modified oligonucleotides are 5-10-5 MOE gapmers. In certain embodiments, modified oligonucleotides are 4-10-6 MOE gapmers. In certain embodiments, modified oligonucleotides are 6-10-4 MOE gapmers. In certain embodiments, modified oligonucleotides are 3-10-7 MOE gapmers. In certain embodiments, modified oligonucleotides are 7-10-3 MOE gapmers. In certain embodiments, modified oligonucleotides are 5-8-5 MOE gapmers. In certain embodiments, modified oligonucleotides are 5-9-5 MOE gapmers. In certain embodiments, modified oligonucleotides are X-Y-Z MOE gapmers, wherein X and Z are independently selected from 1, 2, 3, 4, 5, 6, or 7 linked 2′-MOE nucleosides and Y is selected from 7, 8, 9, 10, or 11 linked deoxynucleosides.

[0373] In certain embodiments, modified oligonucleotides have a sugar motif selected from the following (5′ to 3′): eeeeeddddddddddkkeee, eeeeeeddddddddddkkee, eeeeedddddddddkkeee, eeeeddddddddkkeee, eeeeddddddddkkee, eeeeedyddddddddeeeee, eeeeedyddddddeeeee, or eeeeeedyddddddddeeee, wherein ‘d’ represents a 2′-deoxyribosyl sugar moiety, ‘e’ represents a 2′-MOE sugar moiety, ‘k’ represents a cEt sugar moiety, and ‘y’ represents a 2′-OMe sugar moiety.

### 2. Certain Nucleobase Motifs

[0374] In certain embodiments, oligonucleotides comprise modified and/or unmodified nucleobases arranged along the oligonucleotide or region thereof in a defined pattern or motif. In certain embodiments, each nucleobase is modified. In certain embodiments, none of the nucleobases are modified. In certain embodiments, each purine or each pyrimidine is modified. In certain embodiments, each adenine is modified. In certain embodiments, each guanine is modified. In certain embodiments, each thymine is modified. In certain embodiments, each uracil is modified. In certain embodiments, each cytosine is modified. In certain embodiments, some or all of the cytosine nucleobases in a modified oligonucleotide are 5-methyl cytosines. In certain embodiments, all of the cytosine nucleobases are 5-methyl cytosines and all of the other nucleobases of the modified oligonucleotide are unmodified nucleobases.

[0375] In certain embodiments, modified oligonucleotides comprise a block of modified nucleobases. In certain such embodiments, the block is at the 3′-end of the oligonucleotide. In certain embodiments the block is within 3 nucleosides of the 3′-end of the oligonucleotide. In certain embodiments, the block is at the 5′-end of the oligonucleotide. In certain embodiments the block is within 3 nucleosides of the 5′-end of the oligonucleotide.

[0376] In certain embodiments, oligonucleotides having a gapmer motif comprise a nucleoside comprising a modified nucleobase. In certain such embodiments, one nucleoside comprising a modified nucleobase is in the central gap of an oligonucleotide having a gapmer motif. In certain such embodiments, the sugar moiety of said nucleoside is a 2′-deoxyribosyl moiety. In certain embodiments, the modified nucleobase is selected from: a 2-thiopyrimidine and a 5-propynepyrimidine.

### 3. Certain Internucleoside Linkage Motifs

[0377] In certain embodiments, oligonucleotides comprise modified and/or unmodified internucleoside linkages arranged along the oligonucleotide or region thereof in a defined pattern or motif. In certain embodiments, each internucleoside linking group is a phosphodiester internucleoside linkage (P═O). In certain embodiments, each internucleoside linking group of a modified oligonucleotide is a phosphorothioate internucleoside linkage (P═S). In certain embodiments, each internucleoside linkage of a modified oligonucleotide is independently selected from a phosphorothioate internucleoside linkage and phosphodiester internucleoside linkage. In certain embodiments, each phosphorothioate internucleoside linkage is independently selected from a stereorandom phosphorothioate a (Sp) phosphorothioate, and a (Rp) phosphorothioate. In certain embodiments, the sugar motif of a modified oligonucleotide is a gapmer and the internucleoside linkages within the gap are all modified. In certain such embodiments, some or all of the internucleoside linkages in the wings are unmodified phosphodiester internucleoside linkages. In certain embodiments, the terminal internucleoside linkages are modified. In certain embodiments, the sugar motif of a modified oligonucleotide is a gapmer, and the internucleoside linkage motif comprises at least one phosphodiester internucleoside linkage in at least one wing, wherein the at least one phosphodiester linkage is not a terminal internucleoside linkage, and the remaining internucleoside linkages are phosphorothioate internucleoside linkages. In certain such embodiments, all of the phosphorothioate linkages are stereorandom. In certain embodiments, all of the phosphorothioate linkages in the wings are (Sp) phosphorothioates, and the gap comprises at least one Sp, Sp, Rp motif. In certain embodiments, populations of modified oligonucleotides are enriched for modified oligonucleotides comprising such internucleoside linkage motifs.

### C. Certain Lengths

[0378] It is possible to increase or decrease the length of an oligonucleotide without eliminating activity. For example, in Woolf et al. (Proc. Natl. Acad. Sci. USA 89:7305-7309, 1992), a series of oligonucleotides 13-25 nucleobases in length were tested for their ability to induce cleavage of a target RNA in an oocyte injection model. Oligonucleotides 25 nucleobases in length with 8 or 11 mismatch bases near the ends of the oligonucleotides were able to direct specific cleavage of the target RNA, albeit to a lesser extent than the oligonucleotides that contained no mismatches. Similarly, target specific cleavage was achieved using 13 nucleobase oligonucleotides, including those with 1 or 3 mismatches.

[0379] In certain embodiments, oligonucleotides (including modified oligonucleotides) can have any of a variety of ranges of lengths. In certain embodiments, oligonucleotides consist of X to Y linked nucleosides, where X represents the fewest number of nucleosides in the range and Y represents the largest number nucleosides in the range. In certain such embodiments, X and Y are each independently selected from 8, 9, 10, 11, 12, 13, 14, 15, 16, 17, 18, 19, 20, 21, 22, 23, 24, 25, 26, 27, 28, 29, 30, 31, 32, 33, 34, 35, 36, 37, 38, 39, 40, 41, 42, 43, 44, 45, 46, 47, 48, 49, and 50; provided that X≤Y. For example, in certain embodiments, oligonucleotides consist of 12 to 13, 12 to 14, 12 to 15, 12 to 16, 12 to 17, 12 to 18, 12 to 19, 12 to 20, 12 to 21, 12 to 22, 12 to 23, 12 to 24, 12 to 25, 12 to 26, 12 to 27, 12 to 28, 12 to 29, 12 to 30, 13 to 14, 13 to 15, 13 to 16, 13 to 17, 13 to 18, 13 to 19, 13 to 20, 13 to 21, 13 to 22, 13 to 23, 13 to 24, 13 to 25, 13 to 26, 13 to 27, 13 to 28, 13 to 29, 13 to 30, 14 to 15, 14 to 16, 14 to 17, 14 to 18, 14 to 19, 14 to 20, 14 to 21, 14 to 22, 14 to 23, 14 to 24, 14 to 25, 14 to 26, 14 to 27, 14 to 28, 14 to 29, 14 to 30, 15 to 16, 15 to 17, 15 to 18, 15 to 19, 15 to 20, 15 to 21, 15 to 22, 15 to 23, 15 to 24, 15 to 25, 15 to 26, 15 to 27, 15 to 28, 15 to 29, 15 to 30, 16 to 17, 16 to 18, 16 to 19, 16 to 20, 16 to 21, 16 to 22, 16 to 23, 16 to 24, 16 to 25, 16 to 26, 16 to 27, 16 to 28, 16 to 29, 16 to 30, 17 to 18, 17 to 19, 17 to 20, 17 to 21, 17 to 22, 17 to 23, 17 to 24, 17 to 25, 17 to 26, 17 to 27, 17 to 28, 17 to 29, 17 to 30, 18 to 19, 18 to 20, 18 to 21, 18 to 22, 18 to 23, 18 to 24, 18 to 25, 18 to 26, 18 to 27, 18 to 28, 18 to 29, 18 to 30, 19 to 20, 19 to 21, 19 to 22, 19 to 23, 19 to 24, 19 to 25, 19 to 26, 19 to 29, 19 to 28, 19 to 29, 19 to 30, 20 to 21, 20 to 22, 20 to 23, 20 to 24, 20 to 25, 20 to 26, 20 to 27, 20 to 28, 20 to 29, 20 to 30, 21 to 22, 21 to 23, 21 to 24, 21 to 25, 21 to 26, 21 to 27, 21 to 28, 21 to 29, 21 to 30, 22 to 23, 22 to 24, 22 to 25, 22 to 26, 22 to 27, 22 to 28, 22 to 29, 22 to 30, 23 to 24, 23 to 25, 23 to 26, 23 to 27, 23 to 28, 23 to 29, 23 to 30, 24 to 25, 24 to 26, 24 to 27, 24 to 28, 24 to 29, 24 to 30, 25 to 26, 25 to 27, 25 to 28, 25 to 29, 25 to 30, 26 to 27, 26 to 28, 26 to 29, 26 to 30, 27 to 28, 27 to 29, 27 to 30, 28 to 29, 28 to 30, or 29 to 30 linked nucleosides.

### D. Certain Modified Oligonucleotides

[0380] In certain embodiments, the above modifications (sugar, nucleobase, internucleoside linkage) are incorporated into a modified oligonucleotide. In certain embodiments, modified oligonucleotides are characterized by their modification motifs and overall lengths. In certain embodiments, such parameters are each independent of one another. Thus, unless otherwise indicated, each internucleoside linkage of an oligonucleotide having a gapmer sugar motif may be modified or unmodified and may or may not follow the gapmer modification pattern of the sugar modifications. For example, the internucleoside linkages within the wing regions of a sugar gapmer may be the same or different from one another and may be the same or different from the internucleoside linkages of the gap region of the sugar motif. Likewise, such sugar gapmer oligonucleotides may comprise one or more modified nucleobase independent of the gapmer pattern of the sugar modifications. Unless otherwise indicated, all modifications are independent of nucleobase sequence.

### E. Certain Populations of Modified Oligonucleotides

[0381] Populations of modified oligonucleotides in which all of the modified oligonucleotides of the population have the same molecular formula can be stereorandom populations or chirally enriched populations. All of the chiral centers of all of the modified oligonucleotides are stereorandom in a stereorandom population. In a chirally enriched population, at least one particular chiral center is not stereorandom in the modified oligonucleotides of the population. In certain embodiments, the modified oligonucleotides of a chirally enriched population are enriched for β-D ribosyl sugar moieties, and all of the phosphorothioate internucleoside linkages are stereorandom. In certain embodiments, the modified oligonucleotides of a chirally enriched population are enriched for both β-D ribosyl sugar moieties and at least one, particular phosphorothioate internucleoside linkage in a particular stereochemical configuration.

### F. Nucleobase Sequence

[0382] In certain embodiments, oligonucleotides (unmodified or modified oligonucleotides) are further described by their nucleobase sequence. In certain embodiments oligonucleotides have a nucleobase sequence that is complementary to a second oligonucleotide or an identified reference nucleic acid, such as a target nucleic acid. In certain such embodiments, a region of an oligonucleotide has a nucleobase sequence that is complementary to a second oligonucleotide or an identified reference nucleic acid, such as a target nucleic acid. In certain embodiments, the nucleobase sequence of a region or entire length of an oligonucleotide is at least 50%, at least 60%, at least 70%, at least 80%, at least 85%, at least 90%, at least 95%, or 100% complementary to the second oligonucleotide or nucleic acid, such as a target nucleic acid.

### II. Certain Oligomeric Compounds

[0383] In certain embodiments, provided herein are oligomeric compounds, which consist of an oligonucleotide (modified or unmodified) and optionally one or more conjugate groups and/or terminal groups. Conjugate groups consist of one or more conjugate moiety and a conjugate linker which links the conjugate moiety to the oligonucleotide. Conjugate groups may be attached to either or both ends of an oligonucleotide and/or at any internal position. In certain embodiments, conjugate groups are attached to the 2′-position of a nucleoside of a modified oligonucleotide. In certain embodiments, conjugate groups that are attached to either or both ends of an oligonucleotide are terminal groups. In certain such embodiments, conjugate groups or terminal groups are attached at the 3′ and/or 5′-end of oligonucleotides. In certain such embodiments, conjugate groups (or terminal groups) are attached at the 3′-end of oligonucleotides. In certain embodiments, conjugate groups are attached near the 3′-end of oligonucleotides. In certain embodiments, conjugate groups (or terminal groups) are attached at the 5′-end of oligonucleotides. In certain embodiments, conjugate groups are attached near the 5′-end of oligonucleotides.

[0384] Examples of terminal groups include but are not limited to conjugate groups, capping groups, phosphate moieties, protecting groups, modified or unmodified nucleosides, and two or more nucleosides that are independently modified or unmodified.

### A. Certain Conjugate Groups

[0385] In certain embodiments, oligonucleotides are covalently attached to one or more conjugate groups. In certain embodiments, conjugate groups modify one or more properties of the attached oligonucleotide, including but not limited to pharmacodynamics, phannacokinetics, stability, binding, absorption, tissue distribution, cellular distribution, cellular uptake, charge and clearance. In certain embodiments, conjugate groups impart a new property on the attached oligonucleotide, e.g., fluorophores or reporter groups that enable detection of the oligonucleotide. Certain conjugate groups and conjugate moieties have been described previously, for example: cholesterol moiety (Letsinger et al., Proc. P Natl. Acad. Sci. USA, 1989, 86, 6553-6556), cholic acid (Manoharan et al., Bioorg. Med. Chem. Lett., 1994, 4, 1053-1060), a thioether, e.g., hexyl-S-tritylthiol (Manoharan et al., Ann. N. Y. Acad. Sci., 1992, 660, 306-309; Manoharan et al., Bioorg. Med. Chem. Lett., 1993, 3, 2765-2770), a thiocholesterol (Oberhauser et al., Nucl. Acids Res., 1992, 20, 533-538), an aliphatic chain, e.g., do-decan-diol or undecyl residues (Saison-Behmoaras et al., EMBO J., 1991, 10, 1111-1118; Kabanov et al., FEBS Lett., 1990, 259, 327-330; Svinarchuk et al., Biochimie, 1993, 75, 49-54), a phospholipid, e.g., di-hexadecyl-rac-glycerol or triethyl-ammonium 1,2-di-O-hexadecyl-rac-glycero-3-H-phosphonate (Manoharan et al., Tetrahedron Lett., 1995, 36, 3651-3654; Shea et al., Nucl. Acids Res., 1990, 18, 3777-3783), a polyamine or a polyethylene glycol chain (Manoharan et al., Nucleosides & Nucleotides, 1995, 14, 969-973), or adamantane acetic acid a palmityl moiety (Mishra et al., Biochim. Biophys. Acta, 1995, 1264, 229-237), an octadecylamine or hexylamino-carbonyl-oxycholesterol moiety (Crooke et al., J. Pharmacol. Exp. Ther., 1996, 277, 923-937), a tocopherol group (Nishina et al., Molecular Therapy Nucleic Acids, 2015, 4, e220; and Nishina et al., Molecular Therapy, 2008, 16, 734-740), or a GalNAc cluster (e.g., WO2014/179620).

### 1. Conjugate Moieties

[0386] Conjugate moieties include, without limitation, intercalators, reporter molecules, polyamines, polyamides, peptides, carbohydrates, vitamin moieties, polyethylene glycols, thioethers, polyethers, cholesterols, thiocholesterols, cholic acid moieties, folate, lipids, phospholipids, biotin, phenazine, phenanthridine, anthraquinone, adamantane, acridine, fluoresceins, rhodamines, coumarins, fluorophores, and dyes.

[0387] In certain embodiments, a conjugate moiety comprises an active drug substance, for example, aspirin, warfarin, phenylbutazone, ibuprofen, suprofen, fen-bufen, ketoprofen, (S)-(+)-pranoprofen, carprofen, dansylsarcosine, 2,3,5-triiodobenzoic acid, fingolimod, flufenamic acid, folinic acid, a benzothiadiazide, chlorothiazide, a diazepine, indo-methicin, a barbiturate, a cephalosporin, a sulfa drug, an antidiabetic, an antibacterial or an antibiotic.

### 2. Conjugate Linkers

[0388] Conjugate moieties are attached to oligonucleotides through conjugate linkers. In certain oligomeric compounds, the conjugate linker is a single chemical bond (i.e., the conjugate moiety is attached directly to an oligonucleotide through a single bond). In certain embodiments, the conjugate linker comprises a chain structure, such as a hydrocarbyl chain, or an oligomer of repeating units such as ethylene glycol, nucleosides, or amino acid units.

[0389] In certain embodiments, a conjugate linker comprises one or more groups selected from alkyl, amino, oxo, amide, disulfide, polyethylene glycol, ether, thioether, and hydroxylamino. In certain such embodiments, the conjugate linker comprises groups selected from alkyl, amino, oxo, amide and ether groups. In certain embodiments, the conjugate linker comprises groups selected from alkyl and amide groups. In certain embodiments, the conjugate linker comprises groups selected from alkyl and ether groups. In certain embodiments, the conjugate linker comprises at least one phosphorus moiety. In certain embodiments, the conjugate linker comprises at least one phosphate group. In certain embodiments, the conjugate linker includes at least one neutral linking group.

[0390] In certain embodiments, conjugate linkers, including the conjugate linkers described above, are bifunctional linking moieties, e.g., those known in the art to be useful for attaching conjugate groups to parent compounds, such as the oligonucleotides provided herein. In general, a bifunctional linking moiety comprises at least two functional groups. One of the functional groups is selected to bind to a particular site on a parent compound and the other is selected to bind to a conjugate group. Examples of functional groups used in a bifunctional linking moiety include but are not limited to electrophiles for reacting with nucleophilic groups and nucleophiles for reacting with electrophilic groups. In certain embodiments, bifunctional linking moieties comprise one or more groups selected from amino, hydroxyl, carboxylic acid, thiol, alkyl, alkenyl, and alkynyl.

[0391] Examples of conjugate linkers include but are not limited to pyrrolidine, 8-amino-3,6-dioxaoctanoic acid (ADO), succinimidyl 4-(N-maleimidomethyl) cyclohexane-1-carboxylate (SMCC) and 6-aminohexanoic acid (AHEX or AHA). Other conjugate linkers include but are not limited to substituted or unsubstituted C₁-C₁₀ alkyl, substituted or unsubstituted C₂-C₁₀ alkenyl or substituted or unsubstituted C₂-C₁₀ alkynyl, wherein a nonlimiting list of preferred substituent groups includes hydroxyl, amino, alkoxy, carboxy, benzyl, phenyl, nitro, thiol, thioalkoxy, halogen, alkyl, aryl, alkenyl and alkynyl.

[0392] In certain embodiments, conjugate linkers comprise 1-10 linker-nucleosides. In certain embodiments, conjugate linkers comprise 2-5 linker-nucleosides. In certain embodiments, conjugate linkers comprise exactly 3 linker-nucleosides. In certain embodiments, conjugate linkers comprise the TCA motif. In certain embodiments, such linker-nucleosides are modified nucleosides. In certain embodiments such linker-nucleosides comprise a modified sugar moiety. In certain embodiments, linker-nucleosides are unmodified. In certain embodiments, linker-nucleosides comprise an optionally protected heterocyclic base selected from a purine, substituted purine, pyrimidine or substituted pyrimidine. In certain embodiments, a cleavable moiety is a nucleoside selected from uracil, thymine, cytosine, 4-N-benzoylcytosine, 5-methyl cytosine, 4-N-benzoyl-5-methyl cytosine, adenine, 6-N-benzoyladenine, guanine and 2-N-isobutyrylguanine. It is typically desirable for linker-nucleosides to be cleaved from the oligomeric compound after it reaches a target tissue. Accordingly, linker-nucleosides are typically linked to one another and to the remainder of the oligomeric compound through cleavable bonds. In certain embodiments, such cleavable bonds are phosphodiester bonds.

[0393] Herein, linker-nucleosides are not considered to be part of the oligonucleotide. Accordingly, in embodiments in which an oligomeric compound comprises an oligonucleotide consisting of a specified number or range of linked nucleosides and/or a specified percent complementarity to a reference nucleic acid and the oligomeric compound also comprises a conjugate group comprising a conjugate linker comprising linker-nucleosides, those linker-nucleosides are not counted toward the length of the oligonucleotide and are not used in determining the percent complementarity of the oligonucleotide for the reference nucleic acid. For example, an oligomeric compound may comprise (1) a modified oligonucleotide consisting of 8-30 nucleosides and (2) a conjugate group comprising 1-10 linker-nucleosides that are contiguous with the nucleosides of the modified oligonucleotide. The total number of contiguous linked nucleosides in such an oligomeric compound is more than 30. Alternatively, an oligomeric compound may comprise a modified oligonucleotide consisting of 8-30 nucleosides and no conjugate group. The total number of contiguous linked nucleosides in such an oligomeric compound is no more than 30. Unless otherwise indicated conjugate linkers comprise no more than 10 linker-nucleosides. In certain embodiments, conjugate linkers comprise no more than 5 linker-nucleosides. In certain embodiments, conjugate linkers comprise no more than 3 linker-nucleosides. In certain embodiments, conjugate linkers comprise no more than 2 linker-nucleosides. In certain embodiments, conjugate linkers comprise no more than 1 linker-nucleoside.

[0394] In certain embodiments, it is desirable for a conjugate group to be cleaved from the oligonucleotide. For example, in certain circumstances oligomeric compounds comprising a particular conjugate moiety are better taken up by a particular cell type, but once the oligomeric compound has been taken up, it is desirable that the conjugate group be cleaved to release the unconjugated or parent oligonucleotide. Thus, certain conjugate linkers may comprise one or more cleavable moieties. In certain embodiments, a cleavable moiety is a cleavable bond. In certain embodiments, a cleavable moiety is a group of atoms comprising at least one cleavable bond. In certain embodiments, a cleavable moiety comprises a group of atoms having one, two, three, four, or more than four cleavable bonds. In certain embodiments, a cleavable moiety is selectively cleaved inside a cell or subcellular compartment, such as a lysosome. In certain embodiments, a cleavable moiety is selectively cleaved by endogenous enzymes, such as nucleases.

[0395] In certain embodiments, a cleavable bond is selected from among: an amide, an ester, an ether, one or both esters of a phosphodiester, a phosphate ester, a carbamate, or a disulfide. In certain embodiments, a cleavable bond is one or both of the esters of a phosphodiester. In certain embodiments, a cleavable moiety comprises a phosphate or phosphodiester. In certain embodiments, the cleavable moiety is a phosphate linkage between an oligonucleotide and a conjugate moiety or conjugate group.

[0396] In certain embodiments, a cleavable moiety comprises or consists of one or more linker-nucleosides. In certain such embodiments, the one or more linker-nucleosides are linked to one another and/or to the remainder of the oligomeric compound through cleavable bonds. In certain embodiments, such cleavable bonds are unmodified phosphodiester bonds. In certain embodiments, a cleavable moiety is 2′-deoxynucleoside that is attached to either the 3′ or 5′-terminal nucleoside of an oligonucleotide by a phosphate internucleoside linkage and covalently attached to the remainder of the conjugate linker or conjugate moiety by a phosphate or phosphorothioate linkage. In certain such embodiments, the cleavable moiety is 2′-deoxyadenosine.

### B. Certain Terminal Groups

[0397] In certain embodiments, oligomeric compounds comprise one or more terminal groups. In certain such embodiments, oligomeric compounds comprise a stabilized 5′-phophate. Stabilized 5′-phosphates include, but are not limited to 5′-phosphanates, including, but not limited to 5′-vinylphosphonates. In certain embodiments, terminal groups comprise one or more abasic nucleosides and/or inverted nucleosides. In certain embodiments, terminal groups comprise one or more 2′-linked nucleosides. In certain such embodiments, the 2′-linked nucleoside is an abasic nucleoside.

### III. Oligomeric Duplexes

[0398] In certain embodiments, oligomeric compounds described herein comprise an oligonucleotide, having a nucleobase sequence complementary to that of a target nucleic acid. In certain embodiments, an oligomeric compound is paired with a second oligomeric compound to form an oligomeric duplex. Such oligomeric duplexes comprise a first oligomeric compound having a region complementary to a target nucleic acid and a second oligomeric compound having a region complementary to the first oligomeric compound. In certain embodiments, the first oligomeric compound of an oligomeric duplex comprises or consists of (1) a modified or unmodified oligonucleotide and optionally a conjugate group and (2) a second modified or unmodified oligonucleotide and optionally a conjugate group. Either or both oligomeric compounds of an oligomeric duplex may comprise a conjugate group. The oligonucleotides of each oligomeric compound of an oligomeric duplex may include non-complementary overhanging nucleosides.

### IV. Antisense Activity

[0399] In certain embodiments, oligomeric compounds and oligomeric duplexes are capable of hybridizing to a target nucleic acid, resulting in at least one antisense activity; such oligomeric compounds and oligomeric duplexes are antisense compounds. In certain embodiments, antisense compounds have antisense activity when they reduce or inhibit the amount or activity of a target nucleic acid by 25% or more in the standard cell assay. In certain embodiments, antisense compounds selectively affect one or more target nucleic acid. Such antisense compounds comprise a nucleobase sequence that hybridizes to one or more target nucleic acid, resulting in one or more desired antisense activity and does not hybridize to one or more non-target nucleic acid or does not hybridize to one or more non-target nucleic acid in such a way that results in significant undesired antisense activity.

[0400] In certain antisense activities, hybridization of an antisense compound to a target nucleic acid results in recruitment of a protein that cleaves the target nucleic acid. For example, certain antisense compounds result in RNase H mediated cleavage of the target nucleic acid. RNase H is a cellular endonuclease that cleaves the RNA strand of an RNA:DNA duplex. The DNA in such an RNA:DNA duplex need not be unmodified DNA. In certain embodiments, described herein are antisense compounds that are sufficiently “DNA-like” to elicit RNase H activity. In certain embodiments, one or more non-DNA-like nucleoside in the gap of a gapmer is tolerated.

[0401] In certain antisense activities, an antisense compound or a portion of an antisense compound is loaded into an RNA-induced silencing complex (RISC), ultimately resulting in cleavage of the target nucleic acid. For example, certain antisense compounds result in cleavage of the target nucleic acid by Argonaute. Antisense compounds that are loaded into RISC are RNAi compounds. RNAi compounds may be double-stranded (siRNA) or single-stranded (ssRNA).

[0402] In certain embodiments, hybridization of an antisense compound to a target nucleic acid does not result in recruitment of a protein that cleaves that target nucleic acid. In certain embodiments, hybridization of the antisense compound to the target nucleic acid results in alteration of splicing of the target nucleic acid. In certain embodiments, hybridization of an antisense compound to a target nucleic acid results in inhibition of a binding interaction between the target nucleic acid and a protein or other nucleic acid. In certain embodiments, hybridization of an antisense compound to a target nucleic acid results in alteration of translation of the target nucleic acid.

[0403] Antisense activities may be observed directly or indirectly. In certain embodiments, observation or detection of an antisense activity involves observation or detection of a change in an amount of a target nucleic acid or protein encoded by such target nucleic acid, a change in the ratio of splice variants of a nucleic acid or protein and/or a phenotypic change in a cell or animal.

### V. Certain Target Nucleic Acids

[0404] In certain embodiments, oligomeric compounds comprise or consist of an oligonucleotide comprising a region that is complementary to a target nucleic acid. In certain embodiments, the target nucleic acid is an endogenous RNA molecule. In certain embodiments, the target nucleic acid encodes a protein. In certain such embodiments, the target nucleic acid is selected from: a mature mRNA and a pre-mRNA, including intronic, exonic and untranslated regions. In certain embodiments, the target RNA is a mature mRNA. In certain embodiments, the target nucleic acid is a pre-mRNA. In certain such embodiments, the target region is entirely within an intron. In certain embodiments, the target region spans an intron/exon junction. In certain embodiments, the target region is at least 50% within an intron. In certain embodiments, the target nucleic acid is the RNA transcriptional product of a retrogene. In certain embodiments, the target nucleic acid is a non-coding RNA. In certain such embodiments, the target non-coding RNA is selected from: a long non-coding RNA, a short non-coding RNA, an intronic RNA molecule.

### A. Complementarity/Mismatches to the Target Nucleic Acid

[0405] It is possible to introduce mismatch bases without eliminating activity. For example, Gautschi et al (J. Natl. Cancer Inst. 93:463-471, March 2001) demonstrated the ability of an oligonucleotide having 100% complementarity to the bcl-2 mRNA and having 3 mismatches to the bcl-xL mRNA to reduce the expression of both bcl-2 and bcl-xL in vitro and in vivo. Furthermore, this oligonucleotide demonstrated potent anti-tumor activity in vivo. Maher and Dolnick (Nuc. Acid. Res. 16:3341-3358, 1988) tested a series of tandem 14 nucleobase oligonucleotides, and a 28 and 42 nucleobase oligonucleotides comprised of the sequence of two or three of the tandem oligonucleotides, respectively, for their ability to arrest translation of human DHFR in a rabbit reticulocyte assay. Each of the three 14 nucleobase oligonucleotides alone was able to inhibit translation, albeit at a more modest level than the 28 or 42 nucleobase oligonucleotides.

[0406] In certain embodiments, oligonucleotides are complementary to the target nucleic acid over the entire length of the oligonucleotide. In certain embodiments, oligonucleotides are 99%, 95%, 90%, 85%, or 80% complementary to the target nucleic acid. In certain embodiments, oligonucleotides are at least 80% complementary to the target nucleic acid over the entire length of the oligonucleotide and comprise a region that is 100% or fully complementary to a target nucleic acid. In certain embodiments, the region of full complementarity is from 6 to 20, 10 to 18, or 18 to 20 nucleobases in length.

[0407] In certain embodiments, oligonucleotides comprise one or more mismatched nucleobases relative to the target nucleic acid. In certain embodiments, antisense activity against the target is reduced by such mismatch, but activity against a non-target is reduced by a greater amount. Thus, in certain embodiments selectivity of the oligonucleotide is improved. In certain embodiments, the mismatch is specifically positioned within an oligonucleotide having a gapmer motif. In certain embodiments, the mismatch is at position 1, 2, 3, 4, 5, 6, 7, or 8 from the 5′-end of the gap region. In certain embodiments, the mismatch is at position 9, 8, 7, 6, 5, 4, 3, 2, 1 from the 3′-end of the gap region. In certain embodiments, the mismatch is at position 1, 2, 3, or 4 from the 5′-end of the wing region. In certain embodiments, the mismatch is at position 4, 3, 2, or 1 from the 3′-end of the wing region.

### B. PRNP

[0408] In certain embodiments, oligomeric compounds comprise or consist of an oligonucleotide comprising a region that is complementary to a target nucleic acid, wherein the target nucleic acid is PRNP. In certain embodiments, PRNP nucleic acid has the sequence set forth in SEQ ID NO: 1 (GENBANK Accession No: NM_000311.4) or SEQ ID NO: 2 (GENBANK Accession No: NC_000020.11 truncated from nucleotides 4683001 to 4705000). In certain embodiments, PRNP nucleic acid has the sequence set forth in SEQ ID NO: 3 (GENBANK Accession No.: NM_001080123.2), which is a splicing variant of SEQ ID NO: 1. In certain embodiments, PRNP nucleic acid has the sequence set forth in SEQ ID NO: 4 (ENSEMBL Accession No. ENST00000359125.6 from ENSEMBL version 98: September 2019, human reference assembly version GRCh38.p13 located on the reverse strand of chromosome 20 (CM000682.2) from positions 63,406,137 to U.S. Pat. No. 63,472,590; Yates, et al., “Ensembl 2020”, Nucleic Acids Research, gkz966, 2019), which is a splicing variant of SEQ ID NO: 1.

[0409] In certain embodiments, contacting a cell with an oligomeric compound complementary to SEQ ID NO: 1, SEQ ID NO: 2, SEQ ID NO: 3, or SEQ ID NO: 4 reduces the amount of PRNP RNA, and in certain embodiments reduces the amount of PrP protein. In certain embodiments, the oligomeric compound consists of a modified oligonucleotide. In certain embodiments, contacting a cell with an oligomeric compound complementary to SEQ ID NO: 1, SEQ ID NO: 2, SEQ ID NO: 3, or SEQ ID NO: 4 ameliorates one or more symptom or hallmark of a neurodegenerative disease. In certain embodiments, the oligomeric compound consists of a modified oligonucleotide. In certain embodiments, the symptom or hallmark is spongiform changes in the brain, development of abnormal protein aggregates, neuronal loss, markers of neuronal loss, rapidly progressing dementia, and death. In certain embodiments, the oligomeric compound consists of a modified oligonucleotide.

[0410] In certain embodiments, administration of an oligomeric compound complementary to SEQ ID NO: 1, SEQ ID NO: 2, SEQ ID NO: 3, or SEQ ID NO: 4 reduces the detectable amount of PrP protein in the CSF. In certain embodiments, the PrP protein is PrP^{C}. In certain embodiments, the PrP protein is PrP^{sc}. In certain embodiments, the PrP protein is PrP^{C} and PrP^{sc}

### C. Certain Target Nucleic Acids in Certain Tissues

[0411] In certain embodiments, oligomeric compounds comprise or consist of an oligonucleotide comprising a region that is complementary to a target nucleic acid, wherein the target nucleic acid is expressed in a pharmacologically relevant tissue. In certain embodiments, the pharmacologically relevant tissues are the cells and tissues that comprise the central nervous system (CNS). Such tissues include brain tissues, such as, cortex, substantia nigra, striatum, midbrain, and brainstem and spinal cord.

### VI. Certain Pharmaceutical Compositions

[0412] In certain embodiments, described herein are pharmaceutical compositions comprising one or more oligomeric compounds. In certain embodiments, the one or more oligomeric compounds each consists of a modified oligonucleotide. In certain embodiments, the pharmaceutical composition comprises a pharmaceutically acceptable diluent or carrier. In certain embodiments, a pharmaceutical composition comprises or consists of a sterile saline solution and one or more oligomeric compound. In certain embodiments, the sterile saline is pharmaceutical grade saline. In certain embodiments, a pharmaceutical composition comprises or consists of one or more oligomeric compound and sterile water. In certain embodiments, the sterile water is pharmaceutical grade water. In certain embodiments, a pharmaceutical composition comprises or consists of one or more oligomeric compound and phosphate-buffered saline (PBS). In certain embodiments, the sterile PBS is pharmaceutical grade PBS. In certain embodiments, a pharmaceutical composition comprises or consists of one or more oligomeric compound and artificial cerebrospinal fluid. In certain embodiments, the artificial cerebrospinal fluid is pharmaceutical grade.

[0413] In certain embodiments, a pharmaceutical composition comprises a modified oligonucleotide and artificial cerebrospinal fluid. In certain embodiments, a pharmaceutical composition consists of a modified oligonucleotide and artificial cerebrospinal fluid. In certain embodiments, a pharmaceutical composition consists essentially of a modified oligonucleotide and artificial cerebrospinal fluid. In certain embodiments, the artificial cerebrospinal fluid is pharmaceutical grade.

[0414] In certain embodiments, pharmaceutical compositions comprise one or more oligomeric compound and one or more excipients. In certain embodiments, excipients are selected from water, salt solutions, alcohol, polyethylene glycols, gelatin, lactose, amylase, magnesium stearate, talc, silicic acid, viscous paraffin, hydroxymethylcellulose and polyvinylpyrrolidone.

[0415] In certain embodiments, oligomeric compounds may be admixed with pharmaceutically acceptable active and/or inert substances for the preparation of pharmaceutical compositions or formulations. Compositions and methods for the formulation of pharmaceutical compositions depend on a number of criteria, including, but not limited to, route of administration, extent of disease, or dose to be administered.

[0416] In certain embodiments, pharmaceutical compositions comprising an oligomeric compound encompass any pharmaceutically acceptable salts of the oligomeric compound, esters of the oligomeric compound, or salts of such esters. In certain embodiments, pharmaceutical compositions comprising oligomeric compounds comprising one or more oligonucleotide, upon administration to an animal, including a human, are capable of providing (directly or indirectly) the biologically active metabolite or residue thereof. Accordingly, for example, the disclosure is also drawn to pharmaceutically acceptable salts of oligomeric compounds, prodrugs, pharmaceutically acceptable salts of such prodrugs, and other bioequivalents. Suitable pharmaceutically acceptable salts include, but are not limited to, sodium and potassium salts. In certain embodiments, prodrugs comprise one or more conjugate group attached to an oligonucleotide, wherein the conjugate group is cleaved by endogenous nucleases within the body.

[0417] Lipid moieties have been used in nucleic acid therapies in a variety of methods. In certain such methods, the nucleic acid, such as an oligomeric compound, is introduced into preformed liposomes or lipoplexes made of mixtures of cationic lipids and neutral lipids. In certain methods, DNA complexes with mono- or poly-cationic lipids are formed without the presence of a neutral lipid. In certain embodiments, a lipid moiety is selected to increase distribution of a pharmaceutical agent to a particular cell or tissue. In certain embodiments, a lipid moiety is selected to increase distribution of a pharmaceutical agent to fat tissue. In certain embodiments, a lipid moiety is selected to increase distribution of a pharmaceutical agent to muscle tissue.

[0418] In certain embodiments, pharmaceutical compositions comprise a delivery system. Examples of delivery systems include, but are not limited to, liposomes and emulsions. Certain delivery systems are useful for preparing certain pharmaceutical compositions including those comprising hydrophobic compounds. In certain embodiments, certain organic solvents such as dimethylsulfoxide are used.

[0419] In certain embodiments, pharmaceutical compositions comprise one or more tissue-specific delivery molecules designed to deliver the one or more pharmaceutical agents of the present invention to specific tissues or cell types. For example, in certain embodiments, pharmaceutical compositions include liposomes coated with a tissue-specific antibody.

[0420] In certain embodiments, pharmaceutical compositions comprise a co-solvent system. Certain of such co-solvent systems comprise, for example, benzyl alcohol, a nonpolar surfactant, a water-miscible organic polymer, and an aqueous phase. In certain embodiments, such co-solvent systems are used for hydrophobic compounds. A non-limiting example of such a co-solvent system is the VPD co-solvent system, which is a solution of absolute ethanol comprising 3% w/v benzyl alcohol, 8% w/v of the nonpolar surfactant Polysorbate 80™ and 65% w/v polyethylene glycol 300. The proportions of such co-solvent systems may be varied considerably without significantly altering their solubility and toxicity characteristics. Furthermore, the identity of co-solvent components may be varied: for example, other surfactants may be used instead of Polysorbate 80™; the fraction size of polyethylene glycol may be varied; other biocompatible polymers may replace polyethylene glycol, e.g., polyvinyl pyrrolidone; and other sugars or polysaccharides may substitute for dextrose.

[0421] In certain embodiments, pharmaceutical compositions are prepared for oral administration. In certain embodiments, pharmaceutical compositions are prepared for buccal administration. In certain embodiments, a pharmaceutical composition is prepared for administration by injection (e.g., intravenous, subcutaneous, intramuscular, intrathecal (IT), intracerebroventricular (ICV), etc.). In certain of such embodiments, a pharmaceutical composition comprises a carrier and is formulated in aqueous solution, such as water or physiologically compatible buffers such as Hanks's solution, Ringer's solution, or physiological saline buffer. In certain embodiments, other ingredients are included (e.g., ingredients that aid in solubility or serve as preservatives). In certain embodiments, injectable suspensions are prepared using appropriate liquid carriers, suspending agents and the like. Certain pharmaceutical compositions for injection are presented in unit dosage form, e.g., in ampoules or in multi-dose containers. Certain pharmaceutical compositions for injection are suspensions, solutions or emulsions in oily or aqueous vehicles, and may contain formulatory agents such as suspending, stabilizing and/or dispersing agents. Certain solvents suitable for use in pharmaceutical compositions for injection include, but are not limited to, lipophilic solvents and fatty oils, such as sesame oil, synthetic fatty acid esters, such as ethyl oleate or triglycerides, and liposomes.

### VI. Certain Compositions

### 1. Compound No. 1238994

[0422] In certain embodiments, Compound No. 1238994 is characterized as a 5-10-5 MOE gapmer having a sequence of (from 5′ to 3′) GTCATAATTTTCTTAGCTAC (SEQ ID NO: 1914), wherein each of nucleosides 1-5 and 16-20 (from 5′ to 3′) are 2′-MOE nucleosides and each of nucleosides 6-15 are 2′-β-D-deoxynucleosides, wherein the internucleoside linkages between nucleosides 2 to 3, 3 to 4, 4 to 5, 16 to 17, and 17 to 18 are phosphodiester internucleoside linkages and the internucleoside linkages between nucleosides 1 to 2, 5 to 6, 6 to 7, 7 to 8, 8 to 9, 9 to 10, 10 to 11, 11 to 12, 12 to 13, 13 to 14, 14 to 15, 15 to 16, 18 to 19, and 19 to 20 are phosphorothioate internucleoside linkages, and wherein each cytosine is a 5-methyl cytosine.

[0423] In certain embodiments, Compound No. 1238994 is represented by the following chemical notation (5′ to 3′): Ges Teo ^{m}Ceo Aeo Tes Ads Ads Tds Tds Tds Tds ^{m}Cds Tds Tds Ads Geo ^{m}Ceo Tes Aes ^{m}Ce (SEQ ID NO: 2808), wherein,
[0424] A=an adenine nucleobase,
[0425] ^{m}C=a 5-methyl cytosine nucleobase,
[0426] G=a guanine nucleobase,
[0427] T=a thymine nucleobase,
[0428] e=a 2′-MOE modified sugar,
[0429] d=a 2′-β-D-deoxyribosyl sugar,
[0430] s=a phosphorothioate internucleoside linkage, and
[0431] o=a phosphodiester internucleoside linkage.

[0432] In certain embodiments, Compound No. 1238994 is represented by the following chemical structure:

[chemical structure]

### Structure 1. Compound No. 1238994

[0433] In certain embodiments, the sodium salt of Compound No. 1238994 is represented by the following chemical structure:

[chemical structure]

Structure 2. The sodium salt of Compound No. 1238994

### 2. Compound No. 1373021

[0434] In certain embodiments, Compound No. 1373021 is characterized as a 6-10-4 MOE gapmer having a sequence of (from 5′ to 3′) GTCATAATTTTCTTAGCTAC (SEQ ID NO: 1914), wherein each of nucleosides 1-6 and 17-20 (from 5′ to 3′) are 2′-MOE nucleosides and each of nucleosides 7-16 are 2′-β-D-deoxynucleosides, wherein the internucleoside linkages between nucleosides 2 to 3, 3 to 4, 4 to 5, 5 to 6, 6 to 7 and 17 to 18 are phosphodiester internucleoside linkages and the internucleoside linkages between nucleosides 1 to 2, 7 to 8, 8 to 9, 9 to 10, 10 to 11, 11 to 12, 12 to 13, 13 to 14, 14 to 15, 15 to 16, 16 to 17, 18 to 19, and 19 to 20 are phosphorothioate internucleoside linkages, and wherein each cytosine is a 5-methyl cytosine.

[0435] In certain embodiments, Compound No. 1373021 is represented by the following chemical notation (5′ to 3′): Ges Teo ^{m}Ceo Aeo Teo Aeo Ads Tds Tds Tds Tds ^{m}Cds Tds Tds Ads Gds ^{m}Ceo Tes Aes ^{m}Ce (SEQ ID NO: 2809), wherein,
[0436] A=an adenine nucleobase,
[0437] ^{m}C=a 5-methyl cytosine nucleobase,
[0438] G=a guanine nucleobase,
[0439] T=a thymine nucleobase,
[0440] e=a 2′-MOE modified sugar,
[0441] d=a 2′-β-D deoxyribosyl sugar,
[0442] s=a phosphorothioate internucleoside linkage, and
[0443] o=a phosphodiester internucleoside linkage.

[0444] In certain embodiments, Compound No. 1373021 is represented by the following chemical structure:

[chemical structure]

### Structure 3. Compound No. 1373021

[0445] In certain embodiments, the sodium salt of Compound No. 1373021 is represented by the following chemical structure:

[chemical structure]

Structure 4. The sodium salt of Compound No. 1373021

### 3. Compound No. 1373022

[0446] In certain embodiments, Compound No. 1373022 is characterized as a 6-10-4 MOE gapmer having a sequence of (from 5′ to 3′) GCTTATTATTCATGTTCTCC (SEQ ID NO: 1939), wherein each of nucleosides 1-6 and 17-20 (from 5′ to 3′) are 2′-MOE nucleosides and each of nucleosides 7-16 are 2′-β-D-deoxynucleosides, wherein the internucleoside linkages between nucleosides 2 to 3, 3 to 4, 4 to 5, 5 to 6, 6 to 7 and 17 to 18 are phosphodiester internucleoside linkages and the internucleoside linkages between nucleosides 1 to 2, 7 to 8, 8 to 9, 9 to 10, 10 to 11, 11 to 12, 12 to 13, 13 to 14, 14 to 15, 15 to 16, 16 to 17, 18 to 19, and 19 to 20 are phosphorothioate internucleoside linkages, and wherein each cytosine is a 5-methyl cytosine.

[0447] In certain embodiments, Compound No. 1373022 is represented by the following chemical notation (5′ to 3′): Ges ^{m}Ceo Teo Teo Aeo Teo Tds Ads Tds Tds ^{m}Cds Ads Tds Gds Tds Tds ^{m}Ceo Tes ^{m}Ces ^{m}Ce (SEQ ID NO: 2810), wherein,
[0448] A=an adenine nucleobase,
[0449] ^{m}C=a 5-methyl cytosine nucleobase,
[0450] G=a guanine nucleobase,
[0451] T=a thymine nucleobase,
[0452] e=a 2′-MOE modified sugar,
[0453] d=a 2′-β-D deoxyribosyl sugar,
[0454] s=a phosphorothioate internucleoside linkage, and
[0455] o=a phosphodiester internucleoside linkage.

[0456] In certain embodiments, Compound No. 1373022 is represented by the following chemical structure:

[chemical structure]

### Structure 5. Compound No. 1373022

[0457] In certain embodiments, the sodium salt of Compound No. 1373022 is represented by the following chemical structure:

[chemical structure]

Structure 6. The sodium salt of Compound No. 1373022

### 4. Compound No. 1373023

[0458] In certain embodiments, Compound No. 1373023 is characterized as a 6-10-4 MOE gapmer having a sequence of (from 5′ to 3′) GTGTCATAATTT TCT TAGCT (SEQ ID NO: 2302), wherein each of nucleosides 1-6 and 17-20 (from 5′ to 3′) are 2′-MOE nucleosides and each of nucleosides 7-16 are 2′-β-D-deoxynucleosides, wherein the internucleoside linkages between nucleosides 2 to 3, 3 to 4, 4 to 5, 5 to 6, 6 to 7 and 17 to 18 are phosphodiester internucleoside linkages and the internucleoside linkages between nucleosides 1 to 2, 7 to 8, 8 to 9, 9 to 10, 10 to 11, 11 10 to 12, 12 to 13, 13 to 14, 14 to 15, 15 to 16, 16 to 17, 18 to 19, and 19 to 20 are phosphorothioate internucleoside linkages, and wherein each cytosine is a 5-methyl cytosine.

[0459] In certain embodiments, Compound No. 1373023 is represented by the following chemical notation (5′ to 3′): Ges Teo Geo Teo ^{m}Ceo Aeo Tds Ads Ads Tds Tds Tds Tds ^{m}Cds Tds Tds Aeo Ges ^{tm}Ces Te (SEQ ID NO: 2811), wherein,
[0460] A=an adenine nucleobase,
[0461] ^{m}C=a 5-methyl cytosine nucleobase,
[0462] G=a guanine nucleobase,
[0463] T=a thymine nucleobase,
[0464] e=a 2′-MOE modified sugar,
[0465] d=a 2′-β-D deoxyribosyl sugar,
[0466] s=a phosphorothioate internucleoside linkage, and
[0467] o=a phosphodiester internucleoside linkage.

[0468] In certain embodiments, Compound No. 1373023 is represented by the following chemical structure:

[chemical structure]

### Structure 7. Compound No. 1373023

[0469] In certain embodiments, the sodium salt of Compound No. 1373023 is represented by the following chemical structure:

[chemical structure]

[0470] Structure 8. The sodium salt of Compound No. 1373023PG-9C

### 5. Compound No. 1373057

[0471] In certain embodiments, Compound No. 1373057 is characterized as a 5-9-5 MOE gapmer having a sequence of (from 5′ to 3′) GTCATAATTTTCTTAGCTA (SEQ ID NO: 2750), wherein each of nucleosides 1-5 and 15-19 (from 5′ to 3′) are 2′-MOE nucleosides and each of nucleosides 6-14 are 2′-β-D-deoxynucleosides, wherein the internucleoside linkages between nucleosides 2 to 3, 3 to 4, 4 to 5, 5 to 6, 16 to 17, and 17 to 18 are phosphodiester internucleoside linkages and the internucleoside linkages between nucleosides 1 to 2, 6 to 7, 7 to 8, 8 to 9, 9 to 10, 10 to 11, 11 to 12, 12 to 13, 13 to 14, 14 to 15, 15 to 16, and 18 to 19 are phosphorothioate internucleoside linkages, and wherein each cytosine is a 5-methyl cytosine.

[0472] In certain embodiments, Compound No. 1373057 is represented by the following chemical notation (5′ to 3′): Ges Teo ^{m}Ceo Aeo Teo Ads Ads Tds Tds Tds Tds ^{m}Cds Tds Tds Aes Geo ^{m}Ceo Tes Ae (SEQ ID NO: 2807), wherein,
[0473] A=an adenine nucleobase,
[0474] ^{m}C=a 5-methyl cytosine nucleobase,
[0475] G=a guanine nucleobase,
[0476] T=a thymine nucleobase,
[0477] e=a 2′-MOE modified sugar,
[0478] d=a 2′-β-D deoxyribosyl sugar,
[0479] s=a phosphorothioate internucleoside linkage, and
[0480] o=a phosphodiester internucleoside linkage.

[0481] In certain embodiments, Compound No. 1373057 is represented by the following chemical structure:

[chemical structure]

### Structure 9. Compound No. 1373057

[0482] In certain embodiments, the sodium salt of Compound No. 1373057 is represented by the following chemical structure:

[chemical structure]

Structure 10. The sodium salt of Compound No. 1373057

### 6. Compound No. 1411016

[0483] In certain embodiments, Compound No. 1411016 is characterized as a 5-10-5 MOE gapmer having a sequence of (from 5′ to 3′) ACGTCCATTTTCTGTGCTTT (SEQ ID NO: 2739), wherein each of nucleosides 1-5 and 16-19 (from 5′ to 3′) are 2′-MOE nucleosides and each of nucleosides 6-15 are 2′-β-D-deoxynucleosides, wherein the internucleoside linkages between nucleosides 2 to 3, 3 to 4, 4 to 5, 16 to 17, and 17 to 18 are phosphodiester internucleoside linkages and the internucleoside linkages between nucleosides 1 to 2, 5 to 6, 6 to 7, 7 to 8, 8 to 9, 9 to 10, 10 to 11, 11 to 12, 12 to 13, 13 to 14, 14 to 15, 15 to 16, 18 to 19, and 19 to 20 are phosphorothioate internucleoside linkages, and wherein each cytosine is a 5-methyl cytosine.

[0484] In certain embodiments, Compound No. 1411016 is represented by the following chemical notation (5′ to 3′): Aes ^{m}Ceo Geo Teo ^{m}Ces ^{m}Cds Ads Tds Tds Tds Tds ^{m}Cds Tds Gds Tds Geo ^{m}Ceo Tes Tes Te (SEQ ID NO: 2812), wherein,
[0485] A=an adenine nucleobase,
[0486] ^{m}C=a 5-methyl cytosine nucleobase,
[0487] G=a guanine nucleobase,
[0488] T=a thymine nucleobase,
[0489] e=a 2′-MOE modified sugar,
[0490] d=a 2′-β-D deoxyribosyl sugar,
[0491] s=a phosphorothioate internucleoside linkage, and
[0492] o=a phosphodiester internucleoside linkage.

[0493] In certain embodiments, Compound No. 1411016 is represented by the following chemical structure:

[chemical structure]

### Structure 11. Compound No. 1411016

[0494] In certain embodiments, the sodium salt of Compound No. 1411016 is represented by the following chemical structure:

[chemical structure]

Structure 12. The sodium salt of Compound No. 1411016

### VIII. Certain Comparator Compositions

[0495] In certain embodiments, Compound No. 169746, a 5-10-5 MOE gapmer having a sequence (from 5′ to 3′) of GTTATACTTTTACTGGCCTG (SEQ ID NO: 291), wherein each internucleoside linkage is a phosphorothioate internucleoside linkage, each cytosine is a 5-methyl cytosine, and wherein each of nucleosides 1-5 and 16-20 comprise a 2′-MOE modified sugar, which was previously described in WO2010/019270, incorporated herein by reference, is a comparator compound.

[0496] In certain embodiments, Compound No. 169750, a 5-10-5 MOE gapmer having a sequence (from 5′ to 3′) of TGCATATTTCAAAGACCTGT (SEQ ID NO: 11), wherein each internucleoside linkage is a phosphorothioate internucleoside linkage, each cytosine is a 5-methyl cytosine, and wherein each of nucleosides 1-5 and 16-20 comprise a 2′-MOE modified sugar, which was previously described in WO2010/019270, incorporated herein by reference, is a comparator compound.

[0497] In certain embodiments, Compound No. 169753, a 5-10-5 MOE gapmer having a sequence (from 5′ to 3′) of GCCACATATAGGGTCCTTTA (SEQ ID NO: 66), wherein each internucleoside linkage is a phosphorothioate internucleoside linkage, each cytosine is a 5-methyl cytosine, and wherein each of nucleosides 1-5 and 16-20 comprise a 2′-MOE modified sugar, which was previously described in WO2010/019270, incorporated herein by reference, is a comparator compound.

[0498] In certain embodiments, Compound No. 169764, a 5-10-5 MOE gapmer having a sequence (from 5′ to 3′) of AGGGTCCTTTAAACATCTAA (SEQ ID NO: 450), wherein each internucleoside linkage is a phosphorothioate internucleoside linkage, each cytosine is a 5-methyl cytosine, and wherein each of nucleosides 1-5 and 16-20 comprise a 2′-MOE modified sugar, which was previously described in WO2010/019270, incorporated herein by reference, is a comparator compound.

[0499] Compound Nos. 169746, 169750, 169753, and 169764 were selected as comparator compounds because according to WO2010/019270, these compounds achieved >90% inhibition of PRNP RNA in a human cell line.

[0500] In certain embodiments, compounds described herein are superior relative to compounds described in WO2010/019270, because they demonstrate one or more improved properties, such as, in vivo efficacy and tolerability.

[0501] For example, as described herein, certain compounds Compound No. 1238994, Compound No. 1373021, Compound No. 1373022, Compound No. 1373023, Compound No. 1373057, and Compound No. 1411016 are more efficacious than comparator compounds in vivo. For example, as provided in Example 5, Compound No. 1238994, Compound No. 1373021, Compound No. 1373022, Compound No. 1373023, Compound No. 1373057, and Compound No. 1411016 achieve an average expression level (% control) of 27% (tables 65 and 75), 25% (tables 66 and 75), 30% (tables 66 and 75), 18% (tables 66 and 75), 25% (tables 66 and 75), and 24% (tables 71 and 72), respectively, in the spinal cord of transgenic mice, whereas comparator compounds Compound No. 169746, Compound No. 169750, and Compound No. 169764 achieve an average expression level (% control) of 52% (table 62), 61% (table 62), and 61% (table 62), respectively, in the spinal cord of transgenic mice. Therefore, certain compounds described herein are more efficacious than comparator compounds, Compound No. 169746, Compound No. 169750, and Compound No. 169764 in this assay.

[0502] For example, as provided in Example 5, Compound No. 1238994, Compound No. 1373021, Compound No. 1373022, Compound No. 1373023, Compound No. 1373057, and Compound No. 1411016 achieve an average expression level (% control) of 44% (tables 65 and 75), 33% (tables 66 and 75), 35% (tables 66 and 75), 28% (tables 66 and 75), 52% (tables 66 and 75), and 36% (tables 71 and 72), respectively, in the cortex of transgenic mice, whereas comparator compounds Compound No. 169746, Compound No. 169750, and Compound No. 169764 achieve an average expression level (% control) of 67% (table 62), 73% (table 62), and 77% (table 62), respectively, in the cortex of transgenic mice. Therefore, certain compounds described herein are more efficacious than comparator compounds, Compound No. 169746, Compound No. 169750, and Compound No. 169764 in this assay.

[0503] For example, as described herein, certain compounds Compound No. 1238994, Compound No. 1373021, Compound No. 1373022, Compound No. 1373023, Compound No. 1373057, and Compound No. 1411016 achieved average 3-hour FOB scores in mice of 0 (table 83), 2.5 (table 84), 1.8 (table 84), 0 (table 84), 0 (table 85), and 1.8 (table 94), respectively, at a dose of 700 pg. Compound No. 169753 achieved a 3-hour FOB scores in mouse of 4.2 (table 83). Therefore Compound No. 1238994, Compound No. 1373021, Compound No. 1373022, Compound No. 1373023, Compound No. 1373057, and Compound No. 1411016 described herein are more tolerable than comparator compound Compound No. 169753 in this assay.

[0504] For example, as described herein, certain compounds Compound No. 1238994, Compound No. 1373021, Compound No. 1373022, Compound No. 1373023, Compound No. 1373057, and Compound No. 1411016 achieved average 3-hour FOB scores in rat of 1.0 (table 107), 3.0 (table 97), 1.5 (table 97), 1.3 (table 97), 0.8 (table 98) and 3.3 (table 108), respectively, at a dose of 3 mg. Compound No. 169753 achieved a 3-hour FOB score in rat of 5.5 (table 106). Therefore Compound No. 1238994, Compound No. 1373021, Compound No. 1373022, Compound No. 1373023, Compound No. 1373057, and Compound No. 1411016 described herein are more tolerable than comparator compound Compound No. 169753 in this assay.

[0505] For example, as described herein, certain compounds Compound No. 1238994, Compound No. 1373021, Compound No. 1373022, Compound No. 1373023, Compound No. 1373057, and Compound No. 1411016, are more tolerable in a long-term study in rats than comparator Compound No. 169753. For example, as provided in Example 8, Compound No. 1238994, Compound No. 1373021, Compound No. 1373022, Compound No. 1373023, Compound No. 1373057, and Compound No. 1411016 had no onset of an adverse event during the course of the study. In contrast, each rat treated with Compound No. 169753 had adverse event onset by 5 weeks post-treatment. Therefore, certain compounds described herein are more tolerable than comparator compounds Compound No. 169753 in this assay.

### IX. Certain Hotspot Regions

### 1. Nucleobases 5635-5677 of SEQ ID NO: 2

[0506] In certain embodiments, nucleobases 5635-5677 of SEQ ID NO: 2 comprise a hotspot region. In certain embodiments, modified oligonucleotides are complementary within nucleobases 5635-5677 of SEQ ID NO: 2. In certain embodiments, modified oligonucleotides are 16 nucleobases in length. In certain embodiments, modified oligonucleotides are 17 nucleobases in length. In certain embodiments, modified oligonucleotides are 19 nucleobases in length. In certain embodiments, modified oligonucleotides are 20 nucleobases in length. In certain embodiments, modified oligonucleotides are gapmers. In certain embodiments, modified oligonucleotides are 5-10-5, 6-10-4, 4-10-6, 5-9-5, 4-8-5, or 4-8-4 gapmers. In certain embodiments, the gapmers are MOE gapmers. In certain embodiments, the gapmers are mixed wing gapmers. In certain embodiments, the mixed wing gapmers have the sugar motif in order from 5′ to 3′: eeeeeddddddddddkkeee, eeeeeeddddddddddkkee, eeeeedddddddddkkeee, eeeeddddddddkkeee, or eeeeddddddddkkee; wherein ‘d’ represents a 2′-β-D-deoxyribosyl sugar moiety, ‘k’ represents a cEt sugar moiety, and ‘e’ represents a 2′-MOE sugar moiety. In certain embodiments, the nucleosides of the modified oligonucleotides are linked by phosphorothioate internucleoside linkages and phosphodiester internucleoside linkages. In certain embodiments, the phosphodiester (“o”) and phosphorothioate (“s”) internucleoside linkages are arranged in order from 5′ to 3′: sooossssssssssoooss, sooosssssssssssooss, sooooossssssssssoss, soooossssssssssoos, soosssssssssooss or soosssssssssoos.

[0507] The nucleobase sequences of SEQ ID Nos: 530, 607, 684, 761, 838, 915, 1914, 1992, 2069, 2146, 2237, 2301, 2302, 2536, 2640, 2750, 2759, 2760, 2764, 2788-2793, and 2803-2806 are complementary within nucleobases 5635-5677 of SEQ ID NO: 2.

[0508] Compounds 1238994, 1238995, 1238996, 1238997, 1238998, 1238999, 1239000, 1239001, 1239002, 1239003, 1270398, 1270399, 1270400, 1270564, 1270668, 1373021, 1373023, 1373032, 1373034, 1373050, 1373057, 1373063, 1373065, 1418398-1418403, 1418418-1418420, 1418423, and 1418425 are complementary within nucleobases 5635-5677 of SEQ ID NO: 2.

[0509] In certain embodiments, modified oligonucleotides complementary within nucleobases 5635-5677 of SEQ ID NO: 2. achieve at least 36% reduction of PRNP RNA in vitro in the standard cell assay. In certain embodiments, modified oligonucleotides complementary within nucleobases 5635-5677 of SEQ ID NO: 2 achieve an average of 79% reduction of PRNP RNA in vitro in the standard cell assay. In certain embodiments, modified oligonucleotides complementary within nucleobases 5635-5677 of SEQ ID NO: 2 achieve an average of 44% reduction of PRNP RNA in the cortex in the standard in vivo assay.

### 2. Nucleobases 5791-5826 of SEQ ID NO: 2

[0510] In certain embodiments, nucleobases 5791-5826 of SEQ ID NO: 2 comprise a hotspot region. In certain embodiments, modified oligonucleotides are complementary within nucleobases 5791-5826 of SEQ ID NO: 2. In certain embodiments, modified oligonucleotides are 16 nucleobases in length. In certain embodiments, modified oligonucleotides are 17 nucleobases in length. In certain embodiments, modified oligonucleotides are 18 nucleobases in length. In certain embodiments, modified oligonucleotides are 19 nucleobases in length. In certain embodiments, modified oligonucleotides are 20 nucleobases in length. In certain embodiments, modified oligonucleotides are gapmers. In certain embodiments, modified oligonucleotides are 5-10-5, 6-10-4, 4-10-6, 3-10-7, 7-10-3, or 4-8-5 gapmers. In certain embodiments, the gapmers are MOE gapmers. In certain embodiments, the gapmers are mixed wing gapmers. In certain embodiments, the mixed wing gapmers have the sugar motif in order from 5′ to 3′: eeeeeddddddddddkkeee or eeeeddddddddkkeee; wherein ‘d’ represents a 2′-β-D-deoxyribosyl sugar moiety, ‘k’ represents a cEt sugar moiety, and ‘e’ represents a 2′-MOE sugar moiety. In certain embodiments, the gapmers comprise a 2′-substituted nucleoside in the gap. In certain embodiments, the 2′-substituted nucleoside comprises a 2′-OMe sugar moiety. In certain embodiments, the 2′-substituted nucleoside is at position 2 of the gap (5′ to 3′). In certain embodiments, the gapmers have the sugar motif in order from 5′ to 3′: eeeeedyddddddddeeeee; wherein ‘d’ represents a 2′-β-D-deoxyribosyl sugar moiety, ‘k’ represents a cEt sugar moiety, ‘e’ represents a 2′-MOE sugar moiety, and ‘y’ represents a 2′-OMe sugar moiety. In certain embodiments, the nucleosides of the modified oligonucleotides are linked by phosphorothioate internucleoside linkages and phosphodiester internucleoside linkages. In certain embodiments, the phosphodiester (“o”) and phosphorothioate (“s”) internucleoside linkages are arranged in order from 5′ to 3′: soossssssssssooooss, sooossssssssssoooss, sooosssssssssssooss, sooooossssssssssoss, ssooooossssssssssos, or soosssssssssooss. The nucleobase sequences of SEQ ID Nos: 1225, 1302, 1379, 1456, 2240, 2307, 2308, 2383, 2471, 2537, 2568, 2647, 2736-2739, 2744, 2798-2801 are complementary within nucleobases 5791-5826 of SEQ ID NO: 2.

[0511] Compounds 1239051, 1239052, 1239053, 1239054, 1270415, 1270416, 1270417, 1270418, 1270419, 1270565, 1270596, 1355720, 1411004-1411007, 1411013-1411016, 1418412-1418415, 1418426, 1423120-1423123, and 1423126 are complementary within nucleobases 5791-5826 of SEQ ID NO: 2.

[0512] In certain embodiments, modified oligonucleotides complementary within nucleobases 5791-5826 of SEQ ID NO: 2 achieve at least 55% reduction of PRNP RNA in vitro in the standard cell assay. In certain embodiments, modified oligonucleotides complementary within nucleobases 5791-5826 of SEQ ID NO: 2 achieve an average of 77% reduction of PRNP RNA in vitro in the standard cell assay. In certain embodiments, modified oligonucleotides complementary within nucleobases 5791-5826 of SEQ ID NO: 2 achieve an average of 52% reduction of PRNP RNA in the cortex in the standard in vivo assay.

### 3. Nucleobases 14366-14410 of SEQ ID NO: 2

[0513] In certain embodiments, nucleobases 14366-14410 of SEQ ID NO: 2 comprise a hotspot region. In certain embodiments, modified oligonucleotides are complementary within nucleobases 14366-14410 of SEQ ID NO: 2. In certain embodiments, modified oligonucleotides are 17 nucleobases in length. In certain embodiments, modified oligonucleotides are 18 nucleobases in length. In certain embodiments, modified oligonucleotides are 19 nucleobases in length. In certain embodiments, modified oligonucleotides are 20 nucleobases in length. In certain embodiments, modified oligonucleotides are gapmers. In certain embodiments, modified oligonucleotides are 5-10-5, 6-10-4, 4-10-6, 5-9-5, or 4-8-5 gapmers. In certain embodiments, the gapmers are MOE gapmers. In certain embodiments, the gapmers are mixed wing gapmers. In certain embodiments, the mixed wing gapmers have the sugar motif in order from 5′ to 3′: eeeeeddddddddddkkeee, eeeeeeddddddddddkkee, or eeeeddddddddkkeee; wherein ‘d’ represents a 2′-β-D-deoxyribosyl sugar moiety, ‘k’ represents a cEt sugar moiety, and ‘e’ represents a 2′-MOE sugar moiety. In certain embodiments, the nucleosides of the modified oligonucleotides are linked by phosphorothioate internucleoside linkages and phosphodiester internucleoside linkages. In certain embodiments, the phosphodiester (“o”) and phosphorothioate (“s”) internucleoside linkages are arranged in order from 5′ to 3′: soossssssssssooooss, sooossssssssssoooss, sooosssssssssssooss, soooossssssssssoos, soooosssssssssooss, soosssssssssooss.

[0514] The nucleobase sequences of SEQ ID Nos: 555, 632, 709, 786, 863, 940, 1017, 1862, 1939, 2017, 2094, 2171, 2257, 2334, 2407, 2408, 2488, 2508, 2543, 2612, 2659, 2677, 2757, 2766 and 2794-2797 are complementary within nucleobases 14366-14410 of SEQ ID NO: 2.

[0515] Compounds 1239543, 1239544, 1239545, 1239546, 1239547, 1239548, 1239549, 1239550, 1239551, 1239552, 1239553, 1239554, 1270516, 1270517, 1270518, 1270519, 1270520, 1270521, 1270571, 1270640, 1355714, 1355734, 1373022, 1373031, 1373051, 1373061, 1418404-1418407, 1418421, and 1418424 are complementary within nucleobases 14366-14410 of SEQ ID NO: 2.

[0516] In certain embodiments, modified oligonucleotides complementary within nucleobases 14366-14410 of SEQ ID NO: 2 achieve at least 44% reduction of PRNP RNA in vitro in the standard cell assay. In certain embodiments, modified oligonucleotides complementary within nucleobases 14366-14410 of SEQ ID NO: 2 achieve an average of 62% reduction of PRNP RNA in vitro in the standard cell assay. In certain embodiments, modified oligonucleotides complementary within nucleobases 14366-14410 of SEQ ID NO: 2 achieve an average of 39% reduction of PRNP RNA in the cortex in the standard in vivo assay.

### 4. Additional Hotspot Regions

[0517] In certain embodiments, the ranges described in the Table below comprise hotspot regions. Each hotspot region begins with the nucleobase of SEQ ID NO:1 identified in the “Start Site SEQ ID NO: 1” column and ends with the nucleobase of SEQ ID NO: 1 identified in the “Stop Site SEQ ID NO: 1” column, and/or begins with the nucleobase of SEQ ID NO: 2 identified in the “Start Site SEQ ID NO: 2” column and ends with the nucleobase of SEQ ID NO: 2 identified in the “Stop Site SEQ ID NO: 2” column. In certain embodiments, modified oligonucleotides are complementary within any of the hotspot regions 1-21, as defined in the table below. In certain embodiments, modified oligonucleotides are 16 nucleobases in length. In certain embodiments, modified oligonucleotides are 17 nucleobases in length. In certain embodiments, modified oligonucleotides are 18 nucleobases in length. In certain embodiments, modified oligonucleotides are 19 nucleobases in length. In certain embodiments, modified oligonucleotides are 20 nucleobases in length. In certain embodiments, modified oligonucleotides are gapmers. In certain embodiments, modified oligonucleotides are 5-10-5, 6-10-4, 4-10-6, 3-10-7, 7-10-3, 5-9-5, 5-8-5, 4-8-4, or 5-8-4 gapmers. In certain embodiments, the gapmers are MOE gapmers. In certain embodiments, the gapmers are mixed wing gapmers. In certain embodiments, the mixed wing gapmers have the sugar motif in order from 5′ to 3′: eeeeeddddddddddkkeee, eeeeeeddddddddddkkee, eeeeedddddddddkkeee, eeeeddddddddkkeee, or eeeeddddddddkkee; wherein ‘d’ represents a 2′-β-D-deoxyribosyl sugar moiety, ‘k’ represents a cEt sugar moiety, and ‘e’ represents a 2′-MOE sugar moiety. In certain embodiments, the gapmers comprise a 2′-substituted nucleoside in the gap. In certain embodiments, the 2′-substituted nucleoside comprises a 2′-OMe sugar moiety. In certain embodiments, the 2′-substituted nucleoside is at position 2 of the gap (5′ to 3′). In certain embodiments, the gapmers have the sugar motif in order from 5′ to 3′: eeeeedyddddddddeeeee or eeeeedyddddddeeeee; wherein ‘d’ represents a 2′-β-D-deoxyribosyl sugar moiety, ‘k’ represents a cEt sugar moiety, ‘e’ represents a 2′-MOE sugar moiety, and ‘y’ represents a 2′-OMe sugar moiety. In certain embodiments, the nucleosides of the modified oligonucleotides are linked by phosphorothioate internucleoside linkages and phosphodiester internucleoside linkages. In certain embodiments, the phosphodiester (“o”) and phosphorothioate (“s”) internucleoside linkages are arranged in order from 5′ to 3′: soossssssssssooooss, sooossssssssssoooss, sooossssssssssSooss, sooooossssssssssoss, ssooooossssssssssos, soooossssssssssoos, soooosssssssssooss, soosssssssssooss, sooosssssssssooss, or soosssssssssoos.

[0518] The nucleobase sequence of compounds listed in the “Compound No. in range” column in the table below are complementary to SEQ ID NO: 1 and/or SEQ ID NO: 2 within the specified hotspot region. The nucleobase sequence of the oligonucleotides listed in the “SEQ ID NO: in range” column in the table below are complementary to the target sequence, SEQ ID NO: 1 and/or SEQ ID NO: 2, within the specified hotspot region.

[0519] In certain embodiments, modified oligonucleotides complementary to nucleobases within the hotspot region achieve at least “Min.% Red. in vitro” (minimum % reduction, relative to untreated control cells) of PRNP RNA in vitro in the standard cell assay, as indicated in the table below. In certain embodiments, modified oligonucleotides complementary to nucleobases within the hotspot region achieve an average of “Avg.% Red. in vitro” (average % reduction, relative to untreated control cells) of PRNP RNA in vitro in the standard cell assay, as indicated in the table below. In certain embodiments, modified oligonucleotides complementary to nucleobases within the hotspot region achieve a maximum of “Max. % Red. in vitro” (maximum % reduction, relative to untreated control cells) of PRNP RNA in vitro in the standard cell assay, as indicated in the table below.

TABLE 1
Hotspot Regions of PRNP

| | Start Site | Stop Site | Start Site | Stop Site | | | | | |
|---|---|---|---|---|---|---|---|---|---|
| Hotspot | SEQ ID | SEQ ID | SEQ ID | SEQ ID | Min. % | Max. % | Avg. % | Compound ID | SEQ ID |
| ID | NO: 1 | NO: 1 | NO: 2 | NO: 2 | Reduction | Reduction | Reduction | in range | in range |
| 1 | n/a | n/a | 5633 | 5677 | 36 | 93 | 75 | 1238994-1239003, | 530, 607, 684, |
| | | | | | | | | 1270398-1270400, | 761, 838, 915, |
| | | | | | | | | 1270564, 1270668, | 1914, 2069, |
| | | | | | | | | 1373021, 1373023, | 2146, 2237, |
| | | | | | | | | 1373032, 1373034, | 2301, 2302, |
| | | | | | | | | 1373050, 1373057, | 2536, 2640, |
| | | | | | | | | 1373063, 1373065, | 2750, 2759, |
| | | | | | | | | 1418398-1418403, | 2760, 2764, |
| | | | | | | | | 1418409-1418411, | 2788-2793, |
| | | | | | | | | 1418418-1418420, | 2803-2806 |
| | | | | | | | | 1418423, 1418425 | |
| 2 | n/a | n/a | 5791 | 5826 | 55 | 92 | 77 | 1239051-1239054, | 1225, 1302, |
| | | | | | | | | 1270565, 1270415- | 1379, 1456, |
| | | | | | | | | 1270419, 1270596, | 2240, 2307, |
| | | | | | | | | 1355720, 1411004- | 2308, 2383, |
| | | | | | | | | 1411007, 1411013- | 2471, 2537, |
| | | | | | | | | 1411016, 1418412- | 2568, 2647, |
| | | | | | | | | 1418415, 1418426, | 2736-2739, |
| | | | | | | | | 1423120-1423123, | 2744, 2798-2801 |
| | | | | | | | | 1423126 | |
| 3 | n/a | n/a | 14366 | 14410 | 44 | 88 | 62 | 1239543-1239554, | 555, 632, 709, |
| | | | | | | | | 1270516-1270521, | 786, 863, 940, |
| | | | | | | | | 1270571, 1270640, | 1017, 1862, |
| | | | | | | | | 1355714, 1355734, | 1939, 2017, |
| | | | | | | | | 1373022, 1373031, | 2094, 2171, |
| | | | | | | | | 1373051, 1373061, | 2257, 2334, |
| | | | | | | | | 1418404-1418407, | 2407, 2408, |
| | | | | | | | | 1418421, 1418426 | 2488, 2508, |
| | | | | | | | | | 2543, 2612, |
| | | | | | | | | | 2659, 2677, |
| | | | | | | | | | 2757, 2765, |
| | | | | | | | | | 2794-2797 |
| 4 | n/a | n/a | 4902 | 4929 | 72 | 98 | 90 | 1238802-1238805, | 829, 906, 2060, |
| | | | | | | | | 1270342-1270345 | 2137, 2228, |
| | | | | | | | | | 2283, 2446-2447 |
| 5 | n/a | n/a | 5000 | 5026 | 78 | 98 | 89 | 1238834-1238839 | 1446, 1523, |
| | | | | | | | | 1270351-1270352 | 1600, 1676, |
| | | | | | | | | | 1753, 1830, |
| | | | | | | | | | 2285-2286 |
| 6 | n/a | n/a | 5073 | 5100 | 65 | 98 | 85 | 1201241, 1238863- | 159, 524, 601, |
| | | | | | | | | 1238864, 1270357- | 2287-2288, |
| | | | | | | | | 1270362 | 2231, 2373, |
| | | | | | | | | | 2452-2453 |
| 7 | n/a | n/a | 5515 | 5559 | 66 | 98 | 86 | 1238973-1238975, | 529, 606, 683, |
| | | | | | | | | 1270373-1270387, | 2233-2235, |
| | | | | | | | | 1270560-1270561, | 2293-2297, |
| | | | | | | | | 1270593, 1270629, | 2376-2377, |
| | | | | | | | | 1270666 | 2457-2461, |
| | | | | | | | | | 2532-2533, |
| | | | | | | | | | 2565, 2601, |
| | | | | | | | | | 2638 |
| 8 | n/a | n/a | 5595 | 5632 | 73 | 98 | 85 | 1201248, 1238987- | 237, 1376, 1453, |
| | | | | | | | | 1238992, 1270388- | 1530, 1607, |
| | | | | | | | | 1270394 | 1683, 1760, |
| | | | | | | | | 1270562-1270563, | 2236, 2298- |
| | | | | | | | | 1270594, 1270630 | 2300, 2378, |
| | | | | | | | | | 2462-2463, |
| | | | | | | | | | 2534-2535, |
| | | | | | | | | | 2566, 2602 |
| 9 | n/a | n/a | 5666 | 5690 | 74 | 97 | 87 | 1239008, 1239009, | 1300, 1377, |
| | | | | | | | | 1239010, 1239011, | 1454, 1531, |
| | | | | | | | | 1239012, 1270402, | 1608, 2466 |
| | | | | | | | | 1355708 | |
| 10 | n/a | n/a | 5857 | 5881 | 80 | 93 | 87 | 1239062-1239066 | 610, 687, 764, |
| | | | | | | | | 1270424 | 1995, 2072, |
| | | | | | | | | | 2310 |
| 11 | n/a | n/a | 9352 | 9377 | 70 | 94 | 86 | 1239345-1239347, | 546, 1853, 1930, |
| | | | | | | | | 1270486-1270488, | 2252, 2483, |
| | | | | | | | | 1270602 | 2503, 2574 |
| 12 | n/a | n/a | 11331 | 11358 | 79 | 95 | 89 | 1239447-1239448, | 1243, 1320, |
| | | | | | | | | 1270510-1270515 | 2256, 2333, |
| | | | | | | | | | 2405, 2406, |
| | | | | | | | | | 2487, 2507 |
| 13 | 1329 | 1360 | 17120 | 17151 | 70 | 96 | 86 | 1238243-1238245, | 1650, 1726, |
| | | | | | | | | 1270227-1270233, | 1803, 2190- |
| | | | | | | | | 1270548, 1270579, | 2191, 2264, |
| | | | | | | | | 1335685, 1373020, | 2342-2344, |
| | | | | | | | | 1373026-1373027, | 2417, 2520, |
| | | | | | | | | 1373029-1373030, | 2551, 2746, |
| | | | | | | | | 1373036-1373037, | 2748, 2751, |
| | | | | | | | | 1373042-1373046, | 2752, 2763, |
| | | | | | | | | 1373048, 1373053, | 2767-2768, |
| | | | | | | | | 1373055, 1373058- | 2778-2783 |
| | | | | | | | | 1373060, 1373064, | |
| | | | | | | | | 1373067, 1373070, | |
| | | | | | | | | 1373072-1373075, | |
| | | | | | | | | 1418386, 1418388, | |
| | | | | | | | | 1418416, 1418390- | |
| | | | | | | | | 1418393 | |
| 14 | 1420 | 1450 | 17211 | 17241 | 69 | 97 | 88 | 1201109, 1238254- | 368, 804, 881, |
| | | | | | | | | 1238255, 1270234- | 2192-2193, |
| | | | | | | | | 1270239, 1270580, | 2265, 2345- |
| | | | | | | | | 1270651 | 2346, 2418, |
| | | | | | | | | | 2552, 2623 |
| 15 | 1490 | 1540 | 17281 | 17331 | 72 | 97 | 86 | 1238268-1238271, | 497, 574, 651, |
| | | | | | | | | 1270246-1270253, | 1881, 2196- |
| | | | | | | | | 1270550, 1270582, | 2197, 2267, |
| | | | | | | | | 1270615, 1406261 | 2349-2351, |
| | | | | | | | | | 2420-2421, |
| | | | | | | | | | 2522, 2554, |
| | | | | | | | | | 2587, 2732 |
| 16 | 1619 | 1654 | 17410 | 17445 | 53 | 97 | 83 | 1201121, 1238284- | 370, 1421, 1498, |
| | | | | | | | | 1238286, 1270261- | 1575, 2201, |
| | | | | | | | | 1270263, 1270583, | 2269, 2354, |
| | | | | | | | | 1270652 | 2555, 2624 |
| 17 | 1810 | 1850 | 17601 | 17641 | 64 | 97 | 85 | 1238319-1238335, | 500, 807, 884, |
| | | | | | | | | 1270264-1270266, | 961, 1038, 1115, |
| | | | | | | | | 1270584, 1270653, | 1192, 1269, |
| | | | | | | | | 1355707 | 1346, 1423, |
| | | | | | | | | | 1500, 1577, |
| | | | | | | | | | 1654, 1730, |
| | | | | | | | | | 1807, 1884, |
| | | | | | | | | | 2115, 2202, |
| | | | | | | | | | 2355, 2423, |
| | | | | | | | | | 2556, 2625 |
| 18 | 1844 | 1879 | 17635 | 17670 | 69 | 96 | 82 | 1201138, 1238336- | 296, 577, 654, |
| | | | | | | | | 1238346, 1270269- | 731, 808, 885, |
| | | | | | | | | 1270272, 1270585 | 962, 1039, 1116, |
| | | | | | | | | | 1962, 2039, |
| | | | | | | | | | 2116, 2204, |
| | | | | | | | | | 2356-2357, |
| | | | | | | | | | 2424, 2557 |
| 19 | 1872 | 1921 | 17663 | 17712 | 66 | 97 | 81 | 1238356-1238374 | 501, 578, 655, |
| | | | | | | | | 1270274-1270278, | 732, 809, 886, |
| | | | | | | | | 1270586, 1270617- | 963, 1040, 1117, |
| | | | | | | | | 1270618 | 1194, 1271, |
| | | | | | | | | | 1349, 1425, |
| | | | | | | | | | 1502, 1579, |
| | | | | | | | | | 1885, 1963, |
| | | | | | | | | | 2040, 2117, |
| | | | | | | | | | 2206, 2271, |
| | | | | | | | | | 2358-2359, |
| | | | | | | | | | 2425, 2558, |
| | | | | | | | | | 2589-2590 |
| 20 | 1962 | 1990 | 17753 | 17781 | 63 | 95 | 85 | 1201141-1201145, | 65-66, 143, 220, |
| | | | | | | | | 1238398, 1270281- | 297, 1733, 2208, |
| | | | | | | | | 1270284, 1355706, | 2360, 2426, |
| | | | | | | | | 1373078, 1393330, | 2427, 2754, |
| | | | | | | | | 1393332, 1393334- | 2755, 2771, |
| | | | | | | | | 1393335, 1393337- | 2772, 2776, |
| | | | | | | | | 1393338, 1393342, | 2784-2787 |
| | | | | | | | | 1418417, 1418422, | |
| | | | | | | | | 1418394-1418397 | |
| 21 | 2194 | 2225 | 17985 | 18016 | 46 | 98 | 87 | 1238515-1238517, | 1970, 2047, |
| | | | | | | | | 1270306-1270311, | 2124, 2216- |
| | | | | | | | | 1270554, 1270622 | 2217, 2277, |
| | | | | | | | | | 2365, 2434- |
| | | | | | | | | | 2435, 2526, and |
| | | | | | | | | | 2594 |

### Nonlimiting Disclosure and Incorporation by Reference

[0520] Each of the literature and patent publications listed herein is incorporated by reference in its entirety.

[0521] While certain compounds, compositions and methods described herein have been described with specificity in accordance with certain embodiments, the following examples serve only to illustrate the compounds described herein and are not intended to limit the same. Each of the references, GenBlank accession numbers, and the like recited in the present application is incorporated herein by reference in its entirety.

[0522] Although the sequence listing accompanying this filing identifies each sequence as either “RNA” or “DNA” as required, in reality, those sequences may be modified with any combination of chemical modifications. One of skill in the art will readily appreciate that such designation as “RNA” or “DNA” to describe modified oligonucleotides is, in certain instances, arbitrary. For example, an oligonucleotide comprising a nucleoside comprising a 2′-OH sugar moiety and a thymine base could be described as a DNA having a modified sugar (2′-OH in place of one 2′-H of DNA) or as an RNA having a modified base (thymine (methylated uracil) in place of a uracil of RNA). Accordingly, nucleic acid sequences provided herein, including, but not limited to those in the sequence listing, are intended to encompass nucleic acids containing any combination of natural or modified RNA and/or DNA, including, but not limited to such nucleic acids having modified nucleobases. By way of further example and without limitation, an oligomeric compound having the nucleobase sequence “ATCGATCG” encompasses any oligomeric compounds having such nucleobase sequence, whether modified or unmodified, including, but not limited to, such compounds comprising RNA bases, such as those having sequence “AUCGAUCG” and those having some DNA bases and some RNA bases such as “AUCGATCG” and oligomeric compounds having other modified nucleobases, such as “AT^{m}CGAUCG,” wherein ^{m}C indicates a cytosine base comprising a methyl group at the 5-position.

[0523] Certain compounds described herein (e.g., modified oligonucleotides) have one or more asymmetric center and thus give rise to enantiomers, diastereomers, and other stereoisomeric configurations that may be defined, in terms of absolute stereochemistry, as (R) or (S), as a or P such as for sugar anomers, or as (D) or (L), such as for amino acids, etc. Compounds provided herein that are drawn or described as having certain stereoisomeric configurations include only the indicated compounds. Compounds provided herein that are drawn or described with undefined stereochemistry include all such possible isomers, including their stereorandom and optically pure forms, unless specified otherwise. Likewise, tautomeric forms of the compounds herein are also included unless otherwise indicated. Unless otherwise indicated, compounds described herein are intended to include corresponding salt forms.

[0524] The compounds described herein include variations in which one or more atoms are replaced with a non-radioactive isotope or radioactive isotope of the indicated element. For example, compounds herein that comprise hydrogen atoms encompass all possible deuterium substitutions for each of the ¹H hydrogen atoms. Isotopic substitutions encompassed by the compounds herein include but are not limited to: ²H or ³H in place of ¹H, ¹³C or ¹⁴C in 15 place of ¹²C, ¹⁵N in place of ¹⁴N, ¹⁷O or ¹⁸O in place of ¹⁶O, and ³³S, ³⁴S, ³⁵S, or ³⁶S in place of ³²S. In certain embodiments, non-radioactive isotopic substitutions may impart new properties on the oligomeric compound that are beneficial for use as a therapeutic or research tool. In certain embodiments, radioactive isotopic substitutions may make the compound suitable for research or diagnostic purposes such as imaging.

### Examples

[0525] The following examples illustrate certain embodiments of the present disclosure and are not limiting. Moreover, where specific embodiments are provided, the inventors have contemplated generic application of those specific embodiments. For example, disclosure of an oligonucleotide having a particular motif provides reasonable support for additional oligonucleotides having the same or similar motif. And, for example, where a particular high-affinity modification appears at a particular position, other high-affinity modifications at the same position are considered suitable, unless otherwise indicated.

### Examples

### Example 1: Effect of Modified Oligonucleotides on Human PRNP RNA In Vitro, Single Dose

[0526] Modified oligonucleotides complementary to human PRNP nucleic acid were synthesized and tested for their effect on PRNP RNA levels in vitro.

[0527] The modified oligonucleotides in the tables below are 5-10-5 MOE gapmers with mixed internucleoside linkages. The gapmers are 20 nucleosides in length, wherein the central gap segment consists of ten 2′-β-D-deoxynucleosides and the 3′ and 5′ wings each consist of five 2′-MOE modified nucleosides. The sugar motif of the gapmers is (from 5′ to 3′): eeeeeddddddddddeeeee; wherein “d” represents a 2′-β-D-deoxyribosyl sugar, and ‘e’ represents a 2′-MOE modified ribosyl sugar. The internucleoside linkage motif for the gapmers is (from 5′ to 3′): sooosssssssssssooss; wherein ‘o’ represents a phosphodiester internucleoside linkage and 's′ represents a phosphorothioate internucleoside linkage. Each cytosine residue is a 5-methyl cytosine.

[0528] “Start site” indicates the 5′-most nucleoside to which the gapmer is complementary to in the human gene sequence. “Stop site” indicates the 3′-most nucleoside to which the gapmer is complementary to in the human gene sequence. Most of the modified oligonucleotides listed in the Tables below are complementary to the human PRNP mRNA sequence, designated herein as SEQ ID NO: 1 (GENBANK Accession NO: NM_000311.4) and/or the human PRNP genomic sequence, designated herein as SEQ ID NO: 2 (GENBANK Accession NO: NC_000020.11 truncated from nucleotides 4683001 to 4705000). In addition, certain modified oligonucleotides are complementary to the human PRNP mRNA designated herein as SEQ ID NO: 3 (GENBANK Accession NO: NM_001080123.2). ‘N/A’ indicates that the modified oligonucleotide is not complementary to that particular gene sequence with 100% complementarity.

[0529] Cultured A-431 cells at a density of 20,000 cells per well were treated with 4,000 nM of modified oligonucleotide by free uptake. After a treatment period of approximately 48 hours, total RNA was isolated from the cells and PRNP RNA levels were measured by quantitative real-time RTPCR. Human PRNP primer probe set RTS42354 (forward sequence CCTCTCCTCACGACCGA, designated herein as SEQ ID NO: 21; reverse sequence CCCAGTGTTCCATCCTCCA, designated herein as SEQ ID NO: 22; probe sequence CCACAAAGAGAACCAGCATCCAGCA, designated herein as SEQ ID NO: 23) was used to measure RNA levels. In addition, mRNA levels modulated by modified oligonucleotides described herein in tables 12 and 13 were measured using an additional human PRNP primer probe set, RTS42359 (forward sequence AGTGGAACAAGCCGAGTAAG, designated herein as SEQ ID NO: 24; reverse sequence CCTCATAGTCACTGCCGAAAT, designated herein as SEQ ID NO: 25; probe sequence AACCAACATGAAGCACATGGCTGG, designated herein as SEQ ID NO: 26). PRNP RNA levels were normalized using RIBOGREEN®. Results are presented in the tables below are normalized to PRNP RNA levels in untreated control cells (UTC). Values marked with an asterisk (*) result from oligonucleotides that are complementary to the amplicon region of the primer probe set. Additional assays may be used to measure the potency and efficacy of the modified oligonucleotides complementary to the amplicon region.

TABLE 2
Reduction of PRNP RNA

| | SEQ ID | SEQ ID | SEQ ID | SEQ ID | | | |
|---|---|---|---|---|---|---|---|
| | NO: 1 | NO: 1 | NO: 2 | NO: 2 | | PRNP | |
| Compound | Start | Stop | Start | Stop | | (% UTC) | SEQ ID |
| ID | Site | Site | Site | Site | Sequence (5′ to 3′) | RTS42354 | NO |
| 1200909 | 12 | 31 | 3105 | 3124 | CCCCGTTACATAATGGAGAA | 92 | 27 |
| 1200915 | 96 | 115 | 3189 | 3208 | GCCTGCGGGTGCCATCGCTC | 90 | 28 |
| 1200921 | 105 | 124 | 3198 | 3217 | GTTGATACCGCCTGCGGGTG | 99 | 29 |
| 1200927 | 112 | 131 | 3205 | 3224 | TGCATCAGTTGATACCGCCT | 90 | 30 |
| 1200933 | 161 | 180 | 3254 | 3273 | GCCGGGAATGAGTCACCGGA | 86 | 31 |
| 1200939 | 211 | 230 | 3304 | 3323 | CGGGCGGCCGGCCGAGGTTT | 91 | 32 |
| 1200945 | 236 | 255 | 3329 | 3348 | CCCGGCGCACACTCTGTGCC | 98 | 33 |
| 1200951 | 251 | 270 | 3344 | 3363 | CCAATTGCCGCGCGGCCCGG | 84 | 34 |
| 1200957 | 340 | 359 | 3433 | 3452 | GAGGACAGGCGACGCGCGGG | 95 | 35 |
| 1200965 | 353 | 372 | 3446 | 3465 | AGCGACTGGCTCGGAGGACA | 95 | 36 |
| 1200971 | 384 | 403 | 3477 | 3496 | GAGAGGAGAAGCTCGCGGCG | 84* | 37 |
| 1200977 | 422 | 441 | 16213 | 16232 | AAGGTTCGCCATAATGACTG | 23* | 38 |
| 1200983 | 524 | 543 | 16315 | 16334 | GTATCGGCTGCCCCCAGTGT | 53* | 39 |
| 1200989 | 531 | 550 | 16322 | 16341 | GCCCCGGGTATCGGCTGCCC | 131* | 40 |
| 1200995 | 560 | 579 | 16351 | 16370 | TGGGTAGCGGTTGCCTCCAG | 91 | 41 |
| 1201001 | 571 | 590 | 16362 | 16381 | CCGCCCTGAGGTGGGTAGCG | 89 | 42 |
| 1201007 | 725 | 744 | 16516 | 16535 | TGGCTTACTCGGCTTGTTCC | 41 | 43 |
| 1201013 | 798 | 817 | 16589 | 16608 | GCATGTAGCCGCCAAGGCCC | 86 | 44 |
| 1201019 | 826 | 845 | 16617 | 16636 | ATGATGGGCCTGCTCATGGC | 70 | 45 |
| 1201025 | 851 | 870 | 16642 | 16661 | GTCCTCATAGTCACTGCCGA | 68 | 46 |
| 1201031 | 869 | 888 | 16660 | 16679 | GTTTTCACGATAGTAACGGT | 39 | 47 |
| 1201037 | 904 | 923 | 16695 | 16714 | GGCCTGTAGTACACTTGGTT | 85 | 48 |
| 1201043 | 920 | 939 | 16711 | 16730 | GCTGTACTCATCCATGGGCC | 93 | 49 |
| 1201049 | 981 | 1000 | 16772 | 16791 | TGGTGACCGTGTGCTGCTTG | 51 | 50 |
| 1201055 | 1003 | 1022 | 16794 | 16813 | AAGTTCTCCCCCTTGGTGGT | 50 | 51 |
| 1201061 | 1016 | 1035 | 16807 | 16826 | GTCGGTCTCGGTGAAGTTCT | 52 | 52 |
| 1201067 | 1046 | 1065 | 16837 | 16856 | CTGCTCAACCACGCGCTCCA | 60 | 53 |
| 1201075 | 1095 | 1114 | 16886 | 16905 | CTCTCTGGTAATAGGCCTGA | 63 | 54 |
| 1201081 | 1228 | 1247 | 17019 | 17038 | CGCCTCCCTCAAGCTGGAAA | 93 | 55 |
| 1201087 | 1238 | 1257 | 17029 | 17048 | AGGTGGATACCGCCTCCCTC | 85 | 56 |
| 1201093 | 1307 | 1326 | 17098 | 17117 | AGGGTATTGATTAGCCTATC | 55 | 57 |
| 1201099 | 1393 | 1412 | 17184 | 17203 | AGCAACGGCTCATGATGAAC | 25 | 58 |
| 1201105 | 1404 | 1423 | 17195 | 17214 | GGCCTGGCATTAGCAACGGC | 80 | 59 |
| 1201111 | 1472 | 1491 | 17263 | 17282 | AACCTGTTGCACTAAGTCCA | 17 | 60 |
| 1201117 | 1561 | 1580 | 17352 | 17371 | GCATTAGTATACTGAGCTCT | 48 | 61 |
| 1201123 | 1651 | 1670 | 17442 | 17461 | GGCCTCCTAACAAACCTGGC | 77 | 62 |
| 1201129 | 1742 | 1761 | 17533 | 17552 | TCTCGGTACACACAGAGCTC | 98 | 63 |
| 1201135 | 1788 | 1807 | 17579 | 17598 | AGCTGCTGTGTAGCCCATAC | 26 | 64 |
| 1201141 | 1962 | 1981 | 17753 | 17772 | CCACATATAGGGTCCTTTAA | 18 | 65 |
| 1201142 | 1963 | 1982 | 17754 | 17773 | GCCACATATAGGGTCCTTTA | 9 | 66 |
| 1201148 | 2585 | 2604 | 18376 | 18395 | CACGCAAAAGGGTTTCCCAC | 58 | 67 |
| 1201154 | 2607 | 2626 | 18398 | 18417 | TGCACATTGTAAGCCTAAGG | 6 | 68 |
| 1201160 | N/A | N/A | 3553 | 3572 | TCACTCGGCCCCCGCGGCTC | 99 | 69 |
| 1201166 | N/A | N/A | 3592 | 3611 | CCGGGCACCCTTGCGCCTGG | 93 | 70 |
| 1201172 | N/A | N/A | 3691 | 3710 | CCCGAGCGGAGACCAGCGCA | 74 | 71 |
| 1201178 | N/A | N/A | 3702 | 3721 | AAGCCGCCTCACCCGAGCGG | 84 | 72 |
| 1201184 | N/A | N/A | 3755 | 3774 | CCAGCCCCCCAACGCGCAGT | 71 | 73 |
| 1201190 | N/A | N/A | 3848 | 3867 | CGATCGCCCGCTGGGCCGGA | 78 | 74 |
| 1201196 | N/A | N/A | 3872 | 3891 | CTCCCGGAGTTCCCTGGGCG | 88 | 75 |
| 1201204 | N/A | N/A | 3981 | 4000 | TGGGCCCCGATCTCGGCCTC | 85 | 76 |
| 1201210 | N/A | N/A | 4071 | 4090 | CCGGAACTCCCCCGGCGGGC | 73 | 77 |
| 1201216 | N/A | N/A | 4081 | 4100 | ACCGAGGCTCCCGGAACTCC | 84 | 78 |
| 1201222 | N/A | N/A | 4180 | 4199 | ACGGCCGCAAGGCTGCAGCC | 71 | 79 |
| 1201228 | N/A | N/A | 4227 | 4246 | CGCCCCCGCCCGTCAGTCCG | 84 | 80 |
| 1201234 | N/A | N/A | 4604 | 4623 | TGACCGTGGTGGAATTGCGA | 49 | 81 |
| 1201240 | N/A | N/A | 4759 | 4778 | TGCTAATTAAACCGTGATGC | 32 | 82 |
| 1201246 | N/A | N/A | 5419 | 5438 | GCCCCCAATAACTCATACAT | 91 | 83 |
| 1201252 | N/A | N/A | 5744 | 5763 | GGTGCAGTTAATAACCCACT | 69 | 84 |
| 1201258 | N/A | N/A | 6539 | 6558 | TAGTTGGTTGACAGCCATGT | 68 | 85 |
| 1201264 | N/A | N/A | 6850 | 6869 | ACCTCCCTTAAAGTGATCAC | 81 | 86 |
| 1201270 | N/A | N/A | 6986 | 7005 | AGTCAGAGAGTGCCTAGCGA | 57 | 87 |
| 1201276 | N/A | N/A | 7283 | 7302 | GCTTAATTAGTTACATCGGG | 3 | 88 |
| 1201282 | N/A | N/A | 7390 | 7409 | AGCTAGTAAGAACTTATCCC | 46 | 89 |
| 1201288 | N/A | N/A | 9029 | 9048 | TCTTAGATTTTTGGACGGGA | 12 | 90 |
| 1201294 | N/A | N/A | 9692 | 9711 | AGCTCTATTAATAGGTTAGG | 9 | 91 |
| 1201300 | N/A | N/A | 10098 | 10117 | GCGGTGATGCCATCTACTGA | 86 | 92 |
| 1201306 | N/A | N/A | 10591 | 10610 | GTGGACTGCTAAGACTAGGG | 22 | 93 |
| 1201312 | N/A | N/A | 10805 | 10824 | GCTATATATAGGTGACCCAC | 76 | 94 |
| 1201318 | N/A | N/A | 12095 | 12114 | GCACGATAAAGCTGACTCTG | 61 | 95 |
| 1201324 | N/A | N/A | 13539 | 13558 | TGCAATTAGTGTGATCATGC | 33 | 96 |
| 1201330 | N/A | N/A | 13750 | 13769 | AGTGGCCTAGTCCTCTGGCA | 83 | 97 |
| 1201336 | N/A | N/A | 13946 | 13965 | AGTTAAGGATCTATGAGCTC | 74 | 98 |
| 1201342 | N/A | N/A | 14282 | 14301 | CGCTTGACCCATAGACATGC | 66 | 99 |
| 1201348 | N/A | N/A | 14624 | 14643 | TGGGCCCCATGTAACCTGGT | 97 | 100 |
| 1201354 | N/A | N/A | 14721 | 14740 | TCCTCTTAATATGCGGGTCA | 74 | 101 |
| 1201360 | N/A | N/A | 14819 | 14838 | GACCATCTTATTCGGTGCTT | 41 | 102 |
| 1201366 | N/A | N/A | 14939 | 14958 | CCAATGCTCTAGAGTGACTG | 79 | 103 |
| 1201372 | N/A | N/A | 15466 | 15485 | GCAACCGAAACTGTTGCCAA | 81 | 104 |

TABLE 3
Reduction of PRNP RNA

| | SEQ ID | SEQ ID | SEQ ID | SEQ ID | | | |
|---|---|---|---|---|---|---|---|
| | NO: 1 | NO: 1 | NO: 2 | NO: 2 | | PRNP | |
| Compound | Start | Stop | Start | Stop | | (% UTC) | SEQ ID |
| ID | Site | Site | Site | Site | Sequence (5′ to 3′) | RTS42354 | NO |
| 1200910 | 14 | 33 | 3107 | 3126 | CTCCCCGTTACATAATGGAG | 76 | 105 |
| 1200916 | 98 | 117 | 3191 | 3210 | CCGCCTGCGGGTGCCATCGC | 102 | 106 |
| 1200922 | 106 | 125 | 3199 | 3218 | AGTTGATACCGCCTGCGGGT | 70 | 107 |
| 1200928 | 114 | 133 | 3207 | 3226 | CTTGCATCAGTTGATACCGC | 89 | 108 |
| 1200934 | 162 | 181 | 3255 | 3274 | GGCCGGGAATGAGTCACCGG | 104 | 109 |
| 1200940 | 212 | 231 | 3305 | 3324 | GCGGGCGGCCGGCCGAGGTT | 78 | 110 |
| 1200946 | 241 | 260 | 3334 | 3353 | CGCGGCCCGGCGCACACTCT | 77 | 111 |
| 1200952 | 253 | 272 | 3346 | 3365 | GACCAATTGCCGCGCGGCCC | 80 | 112 |
| 1200958 | 341 | 360 | 3434 | 3453 | GGAGGACAGGCGACGCGCGG | 113 | 113 |
| 1200966 | 355 | 374 | 3448 | 3467 | TCAGCGACTGGCTCGGAGGA | 98 | 114 |
| 1200972 | 416 | 435 | 16207 | 16226 | CGCCATAATGACTGCTCTGC | 19* | 115 |
| 1200978 | 424 | 443 | 16215 | 16234 | CCAAGGTTCGCCATAATGAC | 25* | 116 |
| 1200984 | 525 | 544 | 16316 | 16335 | GGTATCGGCTGCCCCCAGTG | 20* | 117 |
| 1200990 | 532 | 551 | 16323 | 16342 | TGCCCCGGGTATCGGCTGCC | 108* | 118 |
| 1200996 | 561 | 580 | 16352 | 16371 | GTGGGTAGCGGTTGCCTCCA | 91 | 119 |
| 1201002 | 574 | 593 | 16365 | 16384 | CCACCGCCCTGAGGTGGGTA | 54 | 120 |
| 1201008 | 726 | 745 | 16517 | 16536 | TTGGCTTACTCGGCTTGTTC | 35 | 121 |
| 1201014 | 799 | 818 | 16590 | 16609 | AGCATGTAGCCGCCAAGGCC | 88 | 122 |
| 1201020 | 829 | 848 | 16620 | 16639 | TGTATGATGGGCCTGCTCAT | 69 | 123 |
| 1201026 | 852 | 871 | 16643 | 16662 | GGTCCTCATAGTCACTGCCG | 72 | 124 |
| 1201032 | 878 | 897 | 16669 | 16688 | ACGGTGCATGTTTTCACGAT | 69 | 125 |
| 1201038 | 905 | 924 | 16696 | 16715 | GGGCCTGTAGTACACTTGGT | 79 | 126 |
| 1201044 | 942 | 961 | 16733 | 16752 | CGTGCACAAAGTTGTTCTGG | 87 | 127 |
| 1201050 | 982 | 1001 | 16773 | 16792 | GTGGTGACCGTGTGCTGCTT | 55 | 128 |
| 1201056 | 1008 | 1027 | 16799 | 16818 | CGGTGAAGTTCTCCCCCTTG | 67 | 129 |
| 1201062 | 1017 | 1036 | 16808 | 16827 | CGTCGGTCTCGGTGAAGTTC | 58 | 130 |
| 1201068 | 1047 | 1066 | 16838 | 16857 | TCTGCTCAACCACGCGCTCC | 90 | 131 |
| 1201076 | 1104 | 1123 | 16895 | 16914 | TGCTCGATCCTCTCTGGTAA | 77 | 132 |
| 1201082 | 1233 | 1252 | 17024 | 17043 | GATACCGCCTCCCTCAAGCT | 47 | 133 |
| 1201088 | 1239 | 1258 | 17030 | 17049 | CAGGTGGATACCGCCTCCCT | 99 | 134 |
| 1201094 | 1310 | 1329 | 17101 | 17120 | CCAAGGGTATTGATTAGCCT | 16 | 135 |
| 1201100 | 1398 | 1417 | 17189 | 17208 | GCATTAGCAACGGCTCATGA | 63 | 136 |
| 1201106 | 1406 | 1425 | 17197 | 17216 | CTGGCCTGGCATTAGCAACG | 66 | 137 |
| 1201112 | 1474 | 1493 | 17265 | 17284 | TCAACCTGTTGCACTAAGTC | 23 | 138 |
| 1201118 | 1562 | 1581 | 17353 | 17372 | GGCATTAGTATACTGAGCTC | 49 | 139 |
| 1201124 | 1660 | 1679 | 17451 | 17470 | GTATCATGTGGCCTCCTAAC | 14 | 140 |
| 1201130 | 1744 | 1763 | 17535 | 17554 | GTTCTCGGTACACACAGAGC | 83 | 141 |
| 1201136 | 1833 | 1852 | 17624 | 17643 | CTAGCCAGAGGTTCAGTGTT | 46 | 142 |
| 1201142 | 1963 | 1982 | 17754 | 17773 | GCCACATATAGGGTCCTTTA | 7 | 66 |
| 1201143 | 1965 | 1984 | 17756 | 17775 | ATGCCACATATAGGGTCCTT | 10 | 143 |
| 1201149 | 2586 | 2605 | 18377 | 18396 | CCACGCAAAAGGGTTTCCCA | 36 | 144 |
| 1201155 | 2609 | 2628 | 18400 | 18419 | AGTGCACATTGTAAGCCTAA | 47 | 145 |
| 1201161 | N/A | N/A | 3556 | 3575 | TCCTCACTCGGCCCCCGCGG | 74 | 146 |
| 1201167 | N/A | N/A | 3596 | 3615 | CCGGCCGGGCACCCTTGCGC | 104 | 147 |
| 1201173 | N/A | N/A | 3693 | 3712 | CACCCGAGCGGAGACCAGCG | 94 | 148 |
| 1201179 | N/A | N/A | 3704 | 3723 | CCAAGCCGCCTCACCCGAGC | 61 | 149 |
| 1201185 | N/A | N/A | 3790 | 3809 | CCACCGACCTCCCTAACGGG | 101 | 150 |
| 1201191 | N/A | N/A | 3849 | 3868 | GCGATCGCCCGCTGGGCCGG | 95 | 151 |
| 1201198 | N/A | N/A | 3877 | 3896 | CGGCCCTCCCGGAGTTCCCT | 81 | 152 |
| 1201205 | N/A | N/A | 3984 | 4003 | TTCTGGGCCCCGATCTCGGC | 105 | 153 |
| 1201211 | N/A | N/A | 4072 | 4091 | CCCGGAACTCCCCCGGCGGG | 92 | 154 |
| 1201217 | N/A | N/A | 4083 | 4102 | GCACCGAGGCTCCCGGAACT | 78 | 155 |
| 1201223 | N/A | N/A | 4187 | 4206 | GGTGGCAACGGCCGCAAGGC | 87 | 156 |
| 1201229 | N/A | N/A | 4418 | 4437 | TGGTTGTTCCTTGGAGCCCC | 81 | 157 |
| 1201235 | N/A | N/A | 4606 | 4625 | TGTGACCGTGGTGGAATTGC | 35 | 158 |
| 1201241 | N/A | N/A | 5080 | 5099 | GGTGTGGAAGACTTGTGTTA | 35 | 159 |
| 1201247 | N/A | N/A | 5464 | 5483 | GCATCACCAGATTGCTTAAC | 49 | 160 |
| 1201253 | N/A | N/A | 5745 | 5764 | AGGTGCAGTTAATAACCCAC | 62 | 161 |
| 1201259 | N/A | N/A | 6542 | 6561 | GGCTAGTTGGTTGACAGCCA | 90 | 162 |
| 1201265 | N/A | N/A | 6925 | 6944 | CCCGTGATCAGGCTTCAGTG | 66 | 163 |
| 1201271 | N/A | N/A | 6987 | 7006 | CAGTCAGAGAGTGCCTAGCG | 51 | 164 |
| 1201277 | N/A | N/A | 7284 | 7303 | AGCTTAATTAGTTACATCGG | 18 | 165 |
| 1201283 | N/A | N/A | 7435 | 7454 | CCCCGTTCATCTTATTCCCA | 44 | 166 |
| 1201289 | N/A | N/A | 9031 | 9050 | TCTCTTAGATTTTTGGACGG | 32 | 167 |
| 1201295 | N/A | N/A | 9851 | 9870 | GTGGGCACACTTAGCCACCC | 85 | 168 |
| 1201301 | N/A | N/A | 10127 | 10146 | GGTCTGGGACTTCCATAACC | 93 | 169 |
| 1201307 | N/A | N/A | 10592 | 10611 | GGTGGACTGCTAAGACTAGG | 52 | 170 |
| 1201313 | N/A | N/A | 10806 | 10825 | AGCTATATATAGGTGACCCA | 61 | 171 |
| 1201319 | N/A | N/A | 12109 | 12128 | AAGATTCTTGTTCAGCACGA | 53 | 172 |
| 1201325 | N/A | N/A | 13633 | 13652 | CCATTGTCATGGGACTCAAG | 49 | 173 |
| 1201331 | N/A | N/A | 13751 | 13770 | TAGTGGCCTAGTCCTCTGGC | 65 | 174 |
| 1201337 | N/A | N/A | 13947 | 13966 | GAGTTAAGGATCTATGAGCT | 60 | 175 |
| 1201343 | N/A | N/A | 14346 | 14365 | CGGGAGTGCAGGCTCCTTTA | 84 | 176 |
| 1201349 | N/A | N/A | 14639 | 14658 | CGTGGCCATACTGGCTGGGC | 83 | 177 |
| 1201355 | N/A | N/A | 14722 | 14741 | CTCCTCTTAATATGCGGGTC | 75 | 178 |
| 1201361 | N/A | N/A | 14823 | 14842 | ACATGACCATCTTATTCGGT | 55 | 179 |
| 1201367 | N/A | N/A | 15033 | 15052 | AACTAGGGCACCATCCCCTC | 78 | 180 |
| 1201373 | N/A | N/A | 15736 | 15755 | ACAGTACCTGCTGTACCCTA | 49 | 181 |

TABLE 4
Reduction of PRNP RNA

| | SEQ ID | SEQ ID | SEQ ID | SEQ ID | | | |
|---|---|---|---|---|---|---|---|
| | NO: 1 | NO: 1 | NO: 2 | NO: 2 | | PRNP | |
| Compound | Start | Stop | Start | Stop | | (% UTC) | SEQ ID |
| ID | Site | Site | Site | Site | Sequence (5′ to 3′) | RTS42354 | NO |
| 1200911 | 18 | 37 | 3111 | 3130 | CCAGCTCCCCGTTACATAAT | 90 | 182 |
| 1200917 | 99 | 118 | 3192 | 3211 | ACCGCCTGCGGGTGCCATCG | 112 | 183 |
| 1200923 | 107 | 126 | 3200 | 3219 | CAGTTGATACCGCCTGCGGG | 104 | 184 |
| 1200929 | 115 | 134 | 3208 | 3227 | ACTTGCATCAGTTGATACCG | 89 | 185 |
| 1200935 | 199 | 218 | 3292 | 3311 | CGAGGTTTAAGTTAAAGGGT | 86 | 186 |
| 1200941 | 224 | 243 | 3317 | 3336 | TCTGTGCCCCCGGCGGGCGG | 80 | 187 |
| 1200947 | 243 | 262 | 3336 | 3355 | CGCGCGGCCCGGCGCACACT | 80 | 188 |
| 1200953 | 254 | 273 | 3347 | 3366 | GGACCAATTGCCGCGCGGCC | 81 | 189 |
| 1200959 | 342 | 361 | 3435 | 3454 | CGGAGGACAGGCGACGCGCG | 98 | 190 |
| 1200967 | 359 | 378 | 3452 | 3471 | GCTGTCAGCGACTGGCTCGG | 95 | 191 |
| 1200973 | 417 | 436 | 16208 | 16227 | TCGCCATAATGACTGCTCTG | 15* | 192 |
| 1200979 | 428 | 447 | 16219 | 16238 | GCAGCCAAGGTTCGCCATAA | 20* | 193 |
| 1200985 | 526 | 545 | 16317 | 16336 | GGGTATCGGCTGCCCCCAGT | 87* | 194 |
| 1200991 | 535 | 554 | 16326 | 16345 | CCCTGCCCCGGGTATCGGCT | 85 | 195 |
| 1200997 | 562 | 581 | 16353 | 16372 | GGTGGGTAGCGGTTGCCTCC | 90 | 196 |
| 1201003 | 720 | 739 | 16511 | 16530 | TACTCGGCTTGTTCCACTGA | 78 | 197 |
| 1201009 | 730 | 749 | 16521 | 16540 | GTTTTTGGCTTACTCGGCTT | 41 | 198 |
| 1201015 | 800 | 819 | 16591 | 16610 | CAGCATGTAGCCGCCAAGGC | 69 | 199 |
| 1201021 | 830 | 849 | 16621 | 16640 | ATGTATGATGGGCCTGCTCA | 59 | 200 |
| 1201027 | 863 | 882 | 16654 | 16673 | ACGATAGTAACGGTCCTCAT | 41 | 201 |
| 1201033 | 879 | 898 | 16670 | 16689 | AACGGTGCATGTTTTCACGA | 67 | 202 |
| 1201039 | 906 | 925 | 16697 | 16716 | TGGGCCTGTAGTACACTTGG | 82 | 203 |
| 1201045 | 974 | 993 | 16765 | 16784 | CGTGTGCTGCTTGATTGTGA | 41 | 204 |
| 1201051 | 983 | 1002 | 16774 | 16793 | TGTGGTGACCGTGTGCTGCT | 83 | 205 |
| 1201057 | 1009 | 1028 | 16800 | 16819 | TCGGTGAAGTTCTCCCCCTT | 52 | 206 |
| 1201063 | 1038 | 1057 | 16829 | 16848 | CCACGCGCTCCATCATCTTA | 62 | 207 |
| 1201069 | 1050 | 1069 | 16841 | 16860 | ACATCTGCTCAACCACGCGC | 59 | 208 |
| 1201077 | 1105 | 1124 | 16896 | 16915 | ATGCTCGATCCTCTCTGGTA | 77 | 209 |
| 1201083 | 1234 | 1253 | 17025 | 17044 | GGATACCGCCTCCCTCAAGC | 26 | 210 |
| 1201089 | 1243 | 1262 | 17034 | 17053 | GCTGCAGGTGGATACCGCCT | 94 | 211 |
| 1201095 | 1311 | 1330 | 17102 | 17121 | GCCAAGGGTATTGATTAGCC | 9 | 212 |
| 1201101 | 1399 | 1418 | 17190 | 17209 | GGCATTAGCAACGGCTCATG | 40 | 213 |
| 1201107 | 1410 | 1429 | 17201 | 17220 | TTTACTGGCCTGGCATTAGC | 44 | 214 |
| 1201113 | 1480 | 1499 | 17271 | 17290 | TTAGCCTCAACCTGTTGCAC | 33 | 215 |
| 1201119 | 1563 | 1582 | 17354 | 17373 | GGGCATTAGTATACTGAGCT | 15 | 216 |
| 1201125 | 1722 | 1741 | 17513 | 17532 | ATGCTCCAGCGGGCTGAGCC | 110 | 217 |
| 1201131 | 1748 | 1767 | 17539 | 17558 | CCCAGTTCTCGGTACACACA | 41 | 218 |
| 1201137 | 1839 | 1858 | 17630 | 17649 | TGTCCTCTAGCCAGAGGTTC | 93 | 219 |
| 1201142 | 1963 | 1982 | 17754 | 17773 | GCCACATATAGGGTCCTTTA | 9 | 66 |
| 1201144 | 1967 | 1986 | 17758 | 17777 | GAATGCCACATATAGGGTCC | 18 | 220 |
| 1201150 | 2587 | 2606 | 18378 | 18397 | ACCACGCAAAAGGGTTTCCC | 45 | 221 |
| 1201156 | 2617 | 2636 | 18408 | 18427 | AACGATTCAGTGCACATTGT | 23 | 222 |
| 1201162 | N/A | N/A | 3557 | 3576 | GTCCTCACTCGGCCCCCGCG | 61 | 223 |
| 1201168 | N/A | N/A | 3599 | 3618 | CGCCCGGCCGGGCACCCTTG | 86 | 224 |
| 1201174 | N/A | N/A | 3694 | 3713 | TCACCCGAGCGGAGACCAGC | 81 | 225 |
| 1201180 | N/A | N/A | 3707 | 3726 | AAGCCAAGCCGCCTCACCCG | 77 | 226 |
| 1201186 | N/A | N/A | 3809 | 3828 | GCGCTGAGACACCCCGGCGC | 108 | 227 |
| 1201192 | N/A | N/A | 3850 | 3869 | AGCGATCGCCCGCTGGGCCG | 94 | 228 |
| 1201200 | N/A | N/A | 3878 | 3897 | GCGGCCCTCCCGGAGTTCCC | 72 | 229 |
| 1201206 | N/A | N/A | 3986 | 4005 | CGTTCTGGGCCCCGATCTCG | 53 | 230 |
| 1201212 | N/A | N/A | 4073 | 4092 | TCCCGGAACTCCCCCGGCGG | 92 | 231 |
| 1201218 | N/A | N/A | 4120 | 4139 | CCGCCTCCCGGGAGGAACGC | 81 | 232 |
| 1201224 | N/A | N/A | 4193 | 4212 | CCAGGCGGTGGCAACGGCCG | 93 | 233 |
| 1201230 | N/A | N/A | 4425 | 4444 | CCGAGGCTGGTTGTTCCTTG | 94 | 234 |
| 1201236 | N/A | N/A | 4618 | 4637 | GGCGAGGATGGATGTGACCG | 59 | 235 |
| 1201242 | N/A | N/A | 5082 | 5101 | TCGGTGTGGAAGACTTGTGT | 43 | 236 |
| 1201248 | N/A | N/A | 5612 | 5631 | GGTGTTATACATTTAGGCTC | 20 | 237 |
| 1201254 | N/A | N/A | 6201 | 6220 | GCTAAACTAGATTTGTGCCT | 73 | 238 |
| 1201260 | N/A | N/A | 6543 | 6562 | TGGCTAGTTGGTTGACAGCC | 101 | 239 |
| 1201266 | N/A | N/A | 6935 | 6954 | GGAATTGGCACCCGTGATCA | 73 | 240 |
| 1201272 | N/A | N/A | 6988 | 7007 | CCAGTCAGAGAGTGCCTAGC | 81 | 241 |
| 1201278 | N/A | N/A | 7324 | 7343 | CACTAAAGCCTTCTAGCCCA | 66 | 242 |
| 1201284 | N/A | N/A | 7557 | 7576 | GGTGCACTTGACCTGCCAGG | 114 | 243 |
| 1201290 | N/A | N/A | 9317 | 9336 | AGTCCCTAAATCAGCTGTAG | 63 | 244 |
| 1201296 | N/A | N/A | 9852 | 9871 | GGTGGGCACACTTAGCCACC | 94 | 245 |
| 1201302 | N/A | N/A | 10140 | 10159 | TGAGAGTTGCCCGGGTCTGG | 77 | 246 |
| 1201308 | N/A | N/A | 10626 | 10645 | GATCAAATCTGTGGAGCCCC | 94 | 247 |
| 1201314 | N/A | N/A | 10807 | 10826 | CAGCTATATATAGGTGACCC | 64 | 248 |
| 1201320 | N/A | N/A | 13260 | 13279 | TTCCATGGTCTTGATGGCGA | 56 | 249 |
| 1201326 | N/A | N/A | 13697 | 13716 | GGTCAATACCTGTTTATTAC | 24 | 250 |
| 1201332 | N/A | N/A | 13752 | 13771 | GTAGTGGCCTAGTCCTCTGG | 85 | 251 |
| 1201338 | N/A | N/A | 13980 | 13999 | CGGGCTTTGAATGTGCCTCA | 77 | 252 |
| 1201344 | N/A | N/A | 14500 | 14519 | GGCTAAAGTTTGCTCAGTGG | 24 | 253 |
| 1201350 | N/A | N/A | 14676 | 14695 | AGTGAGGCTCCTTTGTACTC | 61 | 254 |
| 1201356 | N/A | N/A | 14723 | 14742 | TCTCCTCTTAATATGCGGGT | 64 | 255 |
| 1201362 | N/A | N/A | 14824 | 14843 | AACATGACCATCTTATTCGG | 73 | 256 |
| 1201368 | N/A | N/A | 15058 | 15077 | GCTACTCATACACCCCAGGA | 45 | 257 |
| 1201374 | N/A | N/A | 15737 | 15756 | AACAGTACCTGCTGTACCCT | 58 | 258 |

TABLE 5
Reduction of PRNP RNA

| | SEQ ID | SEQ ID | SEQ ID | SEQ ID | | | |
|---|---|---|---|---|---|---|---|
| | NO: 1 | NO: 1 | NO: 2 | NO: 2 | | PRNP | |
| Compound | Start | Stop | Start | Stop | | (% UTC) | SEQ ID |
| ID | Site | Site | Site | Site | Sequence (5′ to 3′) | RTS42354 | NO |
| 1200912 | 19 | 38 | 3112 | 3131 | TCCAGCTCCCCGTTACATAA | 77 | 259 |
| 1200918 | 100 | 119 | 3193 | 3212 | TACCGCCTGCGGGTGCCATC | 77 | 260 |
| 1200924 | 108 | 127 | 3201 | 3220 | TCAGTTGATACCGCCTGCGG | 87 | 261 |
| 1200930 | 116 | 135 | 3209 | 3228 | CACTTGCATCAGTTGATACC | 87 | 262 |
| 1200936 | 206 | 225 | 3299 | 3318 | GGCCGGCCGAGGTTTAAGTT | 96 | 263 |
| 1200942 | 231 | 250 | 3324 | 3343 | CGCACACTCTGTGCCCCCGG | 98 | 264 |
| 1200948 | 246 | 265 | 3339 | 3358 | TGCCGCGCGGCCCGGCGCAC | 89 | 265 |
| 1200954 | 255 | 274 | 3348 | 3367 | GGGACCAATTGCCGCGCGGC | 80 | 266 |
| 1200960 | 343 | 362 | 3436 | 3455 | TCGGAGGACAGGCGACGCGC | 113 | 267 |
| 1200968 | 361 | 380 | 3454 | 3473 | CGGCTGTCAGCGACTGGCTC | 90 | 268 |
| 1200974 | 418 | 437 | 16209 | 16228 | TTCGCCATAATGACTGCTCT | 17* | 269 |
| 1200980 | 429 | 448 | 16220 | 16239 | AGCAGCCAAGGTTCGCCATA | 23* | 270 |
| 1200986 | 527 | 546 | 16318 | 16337 | CGGGTATCGGCTGCCCCCAG | 69* | 271 |
| 1200992 | 536 | 555 | 16327 | 16346 | GCCCTGCCCCGGGTATCGGC | 97 | 272 |
| 1200998 | 563 | 582 | 16354 | 16373 | AGGTGGGTAGCGGTTGCCTC | 73 | 273 |
| 1201004 | 721 | 740 | 16512 | 16531 | TTACTCGGCTTGTTCCACTG | 49 | 274 |
| 1201010 | 731 | 750 | 16522 | 16541 | GGTTTTTGGCTTACTCGGCT | 11 | 275 |
| 1201016 | 801 | 820 | 16592 | 16611 | CCAGCATGTAGCCGCCAAGG | 50 | 276 |
| 1201022 | 836 | 855 | 16627 | 16646 | GCCGAAATGTATGATGGGCC | 86 | 277 |
| 1201028 | 864 | 883 | 16655 | 16674 | CACGATAGTAACGGTCCTCA | 49 | 278 |
| 1201034 | 882 | 901 | 16673 | 16692 | GGTAACGGTGCATGTTTTCA | 34 | 279 |
| 1201040 | 909 | 928 | 16700 | 16719 | CCATGGGCCTGTAGTACACT | 79 | 280 |
| 1201046 | 975 | 994 | 16766 | 16785 | CCGTGTGCTGCTTGATTGTG | 38 | 281 |
| 1201052 | 984 | 1003 | 16775 | 16794 | TTGTGGTGACCGTGTGCTGC | 63 | 282 |
| 1201058 | 1010 | 1029 | 16801 | 16820 | CTCGGTGAAGTTCTCCCCCT | 66 | 283 |
| 1201064 | 1040 | 1059 | 16831 | 16850 | AACCACGCGCTCCATCATCT | 41 | 284 |
| 1201070 | 1053 | 1072 | 16844 | 16863 | TACACATCTGCTCAACCACG | 45 | 285 |
| 1201078 | 1112 | 1131 | 16903 | 16922 | GAGGACCATGCTCGATCCTC | 77 | 286 |
| 1201084 | 1235 | 1254 | 17026 | 17045 | TGGATACCGCCTCCCTCAAG | 47 | 287 |
| 1201090 | 1304 | 1323 | 17095 | 17114 | GTATTGATTAGCCTATCCGG | 52 | 288 |
| 1201096 | 1312 | 1331 | 17103 | 17122 | TGCCAAGGGTATTGATTAGC | 21 | 289 |
| 1201102 | 1400 | 1419 | 17191 | 17210 | TGGCATTAGCAACGGCTCAT | 28 | 290 |
| 1201108 | 1418 | 1437 | 17209 | 17228 | GTTATACTTTTACTGGCCTG | 28 | 291 |
| 1201114 | 1555 | 1574 | 17346 | 17365 | GTATACTGAGCTCTAGCTGC | 67 | 292 |
| 1201120 | 1564 | 1583 | 17355 | 17374 | AGGGCATTAGTATACTGAGC | 4 | 293 |
| 1201126 | 1723 | 1742 | 17514 | 17533 | CATGCTCCAGCGGGCTGAGC | 104 | 294 |
| 1201132 | 1755 | 1774 | 17546 | 17565 | ACATCACCCCAGTTCTCGGT | 23 | 295 |
| 1201138 | 1846 | 1865 | 17637 | 17656 | GTGAATATGTCCTCTAGCCA | 12 | 296 |
| 1201142 | 1963 | 1982 | 17754 | 17773 | GCCACATATAGGGTCCTTTA | 11 | 66 |
| 1201145 | 1968 | 1987 | 17759 | 17778 | GGAATGCCACATATAGGGTC | 13 | 297 |
| 1201151 | 2599 | 2618 | 18390 | 18409 | GTAAGCCTAAGGACCACGCA | 21 | 298 |
| 1201157 | 2652 | 2671 | 18443 | 18462 | CCTGTTAATGGTGTCCACTT | 11 | 299 |
| 1201163 | N/A | N/A | 3584 | 3603 | CCTTGCGCCTGGGACCCGAG | 76 | 300 |
| 1201169 | N/A | N/A | 3670 | 3689 | CCGGGCAGGCCCGAGACGCG | 79 | 301 |
| 1201175 | N/A | N/A | 3695 | 3714 | CTCACCCGAGCGGAGACCAG | 97 | 302 |
| 1201181 | N/A | N/A | 3709 | 3728 | CGAAGCCAAGCCGCCTCACC | 89 | 303 |
| 1201187 | N/A | N/A | 3841 | 3860 | CCGCTGGGCCGGACCCGCGC | 92 | 304 |
| 1201193 | N/A | N/A | 3852 | 3871 | CCAGCGATCGCCCGCTGGGC | 84 | 305 |
| 1201201 | N/A | N/A | 3882 | 3901 | GCTGGCGGCCCTCCCGGAGT | 73 | 306 |
| 1201207 | N/A | N/A | 4029 | 4048 | GCACCCTCTGGGCATCGCGG | 85 | 307 |
| 1201213 | N/A | N/A | 4074 | 4093 | CTCCCGGAACTCCCCCGGCG | 85 | 308 |
| 1201219 | N/A | N/A | 4158 | 4177 | CCTCGGAGAAGCTCAGGCGG | 110 | 309 |
| 1201225 | N/A | N/A | 4196 | 4215 | TCTCCAGGCGGTGGCAACGG | 92 | 310 |
| 1201231 | N/A | N/A | 4426 | 4445 | TCCGAGGCTGGTTGTTCCTT | 60 | 311 |
| 1201237 | N/A | N/A | 4634 | 4653 | GCTGTGGCTCTGCGATGGCG | 92 | 312 |
| 1201243 | N/A | N/A | 5235 | 5254 | GCAACCTTCCAGCAAGGGTT | 85 | 313 |
| 1201249 | N/A | N/A | 5614 | 5633 | CTGGTGTTATACATTTAGGC | 40 | 314 |
| 1201255 | N/A | N/A | 6219 | 6238 | ACAATCTGTTGTGGTTCAGC | 7 | 315 |
| 1201261 | N/A | N/A | 6546 | 6565 | GTTTGGCTAGTTGGTTGACA | 32 | 316 |
| 1201267 | N/A | N/A | 6939 | 6958 | TCAGGGAATTGGCACCCGTG | 77 | 317 |
| 1201273 | N/A | N/A | 7051 | 7070 | GGTCCATGATCAGAATTACC | 80 | 318 |
| 1201279 | N/A | N/A | 7325 | 7344 | GCACTAAAGCCTTCTAGCCC | 74 | 319 |
| 1201285 | N/A | N/A | 7559 | 7578 | AGGGTGCACTTGACCTGCCA | 74 | 320 |
| 1201291 | N/A | N/A | 9318 | 9337 | GAGTCCCTAAATCAGCTGTA | 46 | 321 |
| 1201297 | N/A | N/A | 9863 | 9882 | GCTAGTACACAGGTGGGCAC | 75 | 322 |
| 1201303 | N/A | N/A | 10144 | 10163 | GGAGTGAGAGTTGCCCGGGT | 95 | 323 |
| 1201309 | N/A | N/A | 10650 | 10669 | GGTGGGCTTAAGGACCAAAA | 87 | 324 |
| 1201315 | N/A | N/A | 11775 | 11794 | GATTTGGAACCTGCATGGCT | 73 | 325 |
| 1201321 | N/A | N/A | 13443 | 13462 | AGCCTACGAAAACCAACGGC | 95 | 326 |
| 1201327 | N/A | N/A | 13703 | 13722 | GGTAATGGTCAATACCTGTT | 46 | 327 |
| 1201333 | N/A | N/A | 13754 | 13773 | AAGTAGTGGCCTAGTCCTCT | 61 | 328 |
| 1201339 | N/A | N/A | 13984 | 14003 | GAGTCGGGCTTTGAATGTGC | 37 | 329 |
| 1201345 | N/A | N/A | 14618 | 14637 | CCATGTAACCTGGTTCAGGC | 47 | 330 |
| 1201351 | N/A | N/A | 14708 | 14727 | CGGGTCACATCATGCCACTT | 64 | 331 |
| 1201357 | N/A | N/A | 14814 | 14833 | TCTTATTCGGTGCTTCCATC | 36 | 332 |
| 1201363 | N/A | N/A | 14882 | 14901 | ATCTCAGTAGCTCTACCTTG | 41 | 333 |
| 1201369 | N/A | N/A | 15107 | 15126 | CCCTGATGTAGTCCCCACAA | 95 | 334 |
| 1201375 | N/A | N/A | 15789 | 15808 | GGGCACTTAGCTCCAAGAGC | 52 | 335 |

TABLE 6
Reduction of PRNP RNA

| | SEQ ID | SEQ ID | SEQ ID | SEQ ID | | | |
|---|---|---|---|---|---|---|---|
| | NO: 1 | NO: 1 | NO: 2 | NO: 2 | | PRNP | |
| Compound | Start | Stop | Start | Stop | | (% UTC) | SEQ ID |
| ID | Site | Site | Site | Site | Sequence (5′ to 3′) | RTS42354 | NO |
| 1200913 | 46 | 65 | 3139 | 3158 | TCTTTAATTGGAAATTCGGC | 97 | 336 |
| 1200919 | 101 | 120 | 3194 | 3213 | ATACCGCCTGCGGGTGCCAT | 80 | 337 |
| 1200925 | 110 | 129 | 3203 | 3222 | CATCAGTTGATACCGCCTGC | 90 | 338 |
| 1200931 | 128 | 147 | 3221 | 3240 | GATTCGCTTGAACACTTGCA | 103 | 339 |
| 1200937 | 208 | 227 | 3301 | 3320 | GCGGCCGGCCGAGGTTTAAG | 104 | 340 |
| 1200943 | 234 | 253 | 3327 | 3346 | CGGCGCACACTCTGTGCCCC | 101 | 341 |
| 1200949 | 248 | 267 | 3341 | 3360 | ATTGCCGCGCGGCCCGGCGC | 97 | 342 |
| 1200955 | 278 | 297 | 3371 | 3390 | GCTCGCGGGCGGAGGTCGGC | 80 | 343 |
| 1200963 | 345 | 364 | 3438 | 3457 | GCTCGGAGGACAGGCGACGC | 131 | 344 |
| 1200969 | 364 | 383 | 3457 | 3476 | CCGCGGCTGTCAGCGACTGG | 93 | 345 |
| 1200975 | 419 | 438 | 16210 | 16229 | GTTCGCCATAATGACTGCTC | 21* | 346 |
| 1200981 | 432 | 451 | 16223 | 16242 | TCCAGCAGCCAAGGTTCGCC | 22* | 347 |
| 1200987 | 528 | 547 | 16319 | 16338 | CCGGGTATCGGCTGCCCCCA | 100* | 348 |
| 1200993 | 537 | 556 | 16328 | 16347 | TGCCCTGCCCCGGGTATCGG | 67 | 349 |
| 1200999 | 564 | 583 | 16355 | 16374 | GAGGTGGGTAGCGGTTGCCT | 83 | 350 |
| 1201005 | 723 | 742 | 16514 | 16533 | GCTTACTCGGCTTGTTCCAC | 18 | 351 |
| 1201011 | 732 | 751 | 16523 | 16542 | TGGTTTTTGGCTTACTCGGC | 19 | 352 |
| 1201017 | 803 | 822 | 16594 | 16613 | TCCCAGCATGTAGCCGCCAA | 83 | 353 |
| 1201023 | 837 | 856 | 16628 | 16647 | TGCCGAAATGTATGATGGGC | 84 | 354 |
| 1201029 | 865 | 884 | 16656 | 16675 | TCACGATAGTAACGGTCCTC | 47 | 355 |
| 1201035 | 883 | 902 | 16674 | 16693 | GGGTAACGGTGCATGTTTTC | 42 | 356 |
| 1201041 | 911 | 930 | 16702 | 16721 | ATCCATGGGCCTGTAGTACA | 77 | 357 |
| 1201047 | 978 | 997 | 16769 | 16788 | TGACCGTGTGCTGCTTGATT | 46 | 358 |
| 1201053 | 987 | 1006 | 16778 | 16797 | TGGTTGTGGTGACCGTGTGC | 78 | 359 |
| 1201059 | 1011 | 1030 | 16802 | 16821 | TCTCGGTGAAGTTCTCCCCC | 58 | 360 |
| 1201065 | 1043 | 1062 | 16834 | 16853 | CTCAACCACGCGCTCCATCA | 36 | 361 |
| 1201071 | 1059 | 1078 | 16850 | 16869 | GGGTGATACACATCTGCTCA | 93 | 362 |
| 1201079 | 1114 | 1133 | 16905 | 16924 | AAGAGGACCATGCTCGATCC | 84 | 363 |
| 1201085 | 1236 | 1255 | 17027 | 17046 | GTGGATACCGCCTCCCTCAA | 61 | 364 |
| 1201091 | 1305 | 1324 | 17096 | 17115 | GGTATTGATTAGCCTATCCG | 27 | 365 |
| 1201097 | 1316 | 1335 | 17107 | 17126 | TCAGTGCCAAGGGTATTGAT | 76 | 366 |
| 1201103 | 1401 | 1420 | 17192 | 17211 | CTGGCATTAGCAACGGCTCA | 52 | 367 |
| 1201109 | 1421 | 1440 | 17212 | 17231 | GCTGTTATACTTTTACTGGC | 19 | 368 |
| 1201115 | 1556 | 1575 | 17347 | 17366 | AGTATACTGAGCTCTAGCTG | 67 | 369 |
| 1201121 | 1635 | 1654 | 17426 | 17445 | TGGCAGAAATGTTGTCGGGT | 13 | 370 |
| 1201127 | 1729 | 1748 | 17520 | 17539 | AGAGCTCATGCTCCAGCGGG | 95 | 371 |
| 1201133 | 1756 | 1775 | 17547 | 17566 | AACATCACCCCAGTTCTCGG | 23 | 372 |
| 1201139 | 1938 | 1957 | 17729 | 17748 | CTAAAATGGGAGGTTGCCTC | 98 | 373 |
| 1201142 | 1963 | 1982 | 17754 | 17773 | GCCACATATAGGGTCCTTTA | 11 | 66 |
| 1201146 | 1998 | 2017 | 17789 | 17808 | GCTGCCTTAATTACCTATAG | 46 | 374 |
| 1201152 | 2600 | 2619 | 18391 | 18410 | TGTAAGCCTAAGGACCACGC | 27 | 375 |
| 1201158 | 2653 | 2672 | 18444 | 18463 | ACCTGTTAATGGTGTCCACT | 24 | 376 |
| 1201164 | N/A | N/A | 3585 | 3604 | CCCTTGCGCCTGGGACCCGA | 85 | 377 |
| 1201170 | N/A | N/A | 3686 | 3705 | GCGGAGACCAGCGCAGCCGG | 93 | 378 |
| 1201176 | N/A | N/A | 3698 | 3717 | CGCCTCACCCGAGCGGAGAC | 101 | 379 |
| 1201182 | N/A | N/A | 3710 | 3729 | GCGAAGCCAAGCCGCCTCAC | 82 | 380 |
| 1201188 | N/A | N/A | 3842 | 3861 | CCCGCTGGGCCGGACCCGCG | 100 | 381 |
| 1201194 | N/A | N/A | 3853 | 3872 | GCCAGCGATCGCCCGCTGGG | 110 | 382 |
| 1201202 | N/A | N/A | 3895 | 3914 | CCCTGCGGAGCCCGCTGGCG | 107 | 383 |
| 1201208 | N/A | N/A | 4031 | 4050 | AAGCACCCTCTGGGCATCGC | 70 | 384 |
| 1201214 | N/A | N/A | 4079 | 4098 | CGAGGCTCCCGGAACTCCCC | 79 | 385 |
| 1201220 | N/A | N/A | 4163 | 4182 | GCCCCCCTCGGAGAAGCTCA | 77 | 386 |
| 1201226 | N/A | N/A | 4203 | 4222 | GGCCGCTTCTCCAGGCGGTG | 106 | 387 |
| 1201232 | N/A | N/A | 4427 | 4446 | ATCCGAGGCTGGTTGTTCCT | 52 | 388 |
| 1201238 | N/A | N/A | 4640 | 4659 | CGGAGAGCTGTGGCTCTGCG | 93 | 389 |
| 1201244 | N/A | N/A | 5236 | 5255 | GGCAACCTTCCAGCAAGGGT | 58 | 390 |
| 1201250 | N/A | N/A | 5622 | 5641 | CTACTGCCCTGGTGTTATAC | 52 | 391 |
| 1201256 | N/A | N/A | 6339 | 6358 | ATGCACCCGAGTGGCCTCTG | 80 | 392 |
| 1201262 | N/A | N/A | 6547 | 6566 | GGTTTGGCTAGTTGGTTGAC | 26 | 393 |
| 1201268 | N/A | N/A | 6941 | 6960 | TCTCAGGGAATTGGCACCCG | 71 | 394 |
| 1201274 | N/A | N/A | 7231 | 7250 | ACCCCATAATGTCCCTTGTC | 82 | 395 |
| 1201280 | N/A | N/A | 7326 | 7345 | GGCACTAAAGCCTTCTAGCC | 102 | 396 |
| 1201286 | N/A | N/A | 7560 | 7579 | AAGGGTGCACTTGACCTGCC | 101 | 397 |
| 1201292 | N/A | N/A | 9490 | 9509 | GCATTCCCATTAATGTGGTG | 41 | 398 |
| 1201298 | N/A | N/A | 9919 | 9938 | GTCTTCACCTGAGATGTAGT | 45 | 399 |
| 1201304 | N/A | N/A | 10147 | 10166 | GGAGGAGTGAGAGTTGCCCG | 87 | 400 |
| 1201310 | N/A | N/A | 10662 | 10681 | GATACTTAGCTTGGTGGGCT | 53 | 401 |
| 1201316 | N/A | N/A | 11827 | 11846 | GCTTATCAGGATAGCACAAA | 57 | 402 |
| 1201322 | N/A | N/A | 13457 | 13476 | TGGGACTGAAGGTCAGCCTA | 109 | 403 |
| 1201328 | N/A | N/A | 13746 | 13765 | GCCTAGTCCTCTGGCATATT | 105 | 404 |
| 1201334 | N/A | N/A | 13758 | 13777 | AGTCAAGTAGTGGCCTAGTC | 46 | 405 |
| 1201340 | N/A | N/A | 13995 | 14014 | GGAATGACACTGAGTCGGGC | 58 | 406 |
| 1201346 | N/A | N/A | 14619 | 14638 | CCCATGTAACCTGGTTCAGG | 78 | 407 |
| 1201352 | N/A | N/A | 14718 | 14737 | TCTTAATATGCGGGTCACAT | 61 | 408 |
| 1201358 | N/A | N/A | 14815 | 14834 | ATCTTATTCGGTGCTTCCAT | 44 | 409 |
| 1201364 | N/A | N/A | 14905 | 14924 | GCATACATTGGATCTATCAG | 22 | 410 |
| 1201370 | N/A | N/A | 15181 | 15200 | GGTCATGCCAGTTAGGGTTT | 22 | 411 |
| 1201376 | N/A | N/A | 15796 | 15815 | TTACCCTGGGCACTTAGCTC | 85 | 412 |

TABLE 7
Reduction of PRNP RNA

| | SEQ ID | SEQ ID | SEQ ID | SEQ ID | | | |
|---|---|---|---|---|---|---|---|
| | NO: 1 | NO: 1 | NO: 2 | NO: 2 | | PRNP | |
| Compound | Start | Stop | Start | Stop | | (% UTC) | SEQ ID |
| ID | Site | Site | Site | Site | Sequence (5′ to 3′) | RTS42354 | NO |
| 1200914 | 91 | 110 | 3184 | 3203 | CGGGTGCCATCGCTCCCTGA | 68 | 413 |
| 1200920 | 102 | 121 | 3195 | 3214 | GATACCGCCTGCGGGTGCCA | 77 | 414 |
| 1200926 | 111 | 130 | 3204 | 3223 | GCATCAGTTGATACCGCCTG | 103 | 415 |
| 1200932 | 138 | 157 | 3231 | 3250 | AACGAGTTGAGATTCGCTTG | 96 | 416 |
| 1200938 | 209 | 228 | 3302 | 3321 | GGCGGCCGGCCGAGGTTTAA | 89 | 417 |
| 1200944 | 235 | 254 | 3328 | 3347 | CCGGCGCACACTCTGTGCCC | 96 | 418 |
| 1200950 | 250 | 269 | 3343 | 3362 | CAATTGCCGCGCGGCCCGGC | 76 | 419 |
| 1200956 | 279 | 298 | 3372 | 3391 | CGCTCGCGGGCGGAGGTCGG | 116 | 420 |
| 1200964 | 352 | 371 | 3445 | 3464 | GCGACTGGCTCGGAGGACAG | 107 | 421 |
| 1200970 | 366 | 385 | 3459 | 3478 | CGCCGCGGCTGTCAGCGACT | 99 | 422 |
| 1200976 | 421 | 440 | 16212 | 16231 | AGGTTCGCCATAATGACTGC | 25* | 423 |
| 1200982 | 485 | 504 | 16276 | 16295 | GCGCTTCTTGCAGAGGCCCA | 42* | 424 |
| 1200988 | 529 | 548 | 16320 | 16339 | CCCGGGTATCGGCTGCCCCC | 82* | 425 |
| 1200994 | 559 | 578 | 16350 | 16369 | GGGTAGCGGTTGCCTCCAGG | 99 | 426 |
| 1201000 | 568 | 587 | 16359 | 16378 | CCCTGAGGTGGGTAGCGGTT | 95 | 427 |
| 1201006 | 724 | 743 | 16515 | 16534 | GGCTTACTCGGCTTGTTCCA | 30 | 428 |
| 1201012 | 796 | 815 | 16587 | 16606 | ATGTAGCCGCCAAGGCCCCC | 97 | 429 |
| 1201018 | 805 | 824 | 16596 | 16615 | CTTCCCAGCATGTAGCCGCC | 83 | 430 |
| 1201024 | 850 | 869 | 16641 | 16660 | TCCTCATAGTCACTGCCGAA | 60 | 431 |
| 1201030 | 866 | 885 | 16657 | 16676 | TTCACGATAGTAACGGTCCT | 59 | 432 |
| 1201036 | 901 | 920 | 16692 | 16711 | CTGTAGTACACTTGGTTGGG | 35 | 433 |
| 1201042 | 916 | 935 | 16707 | 16726 | TACTCATCCATGGGCCTGTA | 75 | 434 |
| 1201048 | 980 | 999 | 16771 | 16790 | GGTGACCGTGTGCTGCTTGA | 46 | 435 |
| 1201054 | 998 | 1017 | 16789 | 16808 | CTCCCCCTTGGTGGTTGTGG | 73 | 436 |
| 1201060 | 1013 | 1032 | 16804 | 16823 | GGTCTCGGTGAAGTTCTCCC | 93 | 437 |
| 1201066 | 1045 | 1064 | 16836 | 16855 | TGCTCAACCACGCGCTCCAT | 72 | 438 |
| 1201072 | 1089 | 1108 | 16880 | 16899 | GGTAATAGGCCTGAGATTCC | 25 | 439 |
| 1201080 | 1118 | 1137 | 16909 | 16928 | GGAGAAGAGGACCATGCTCG | 88 | 440 |
| 1201086 | 1237 | 1256 | 17028 | 17047 | GGTGGATACCGCCTCCCTCA | 95 | 441 |
| 1201092 | 1306 | 1325 | 17097 | 17116 | GGGTATTGATTAGCCTATCC | 32 | 442 |
| 1201098 | 1392 | 1411 | 17183 | 17202 | GCAACGGCTCATGATGAACT | 18 | 443 |
| 1201104 | 1402 | 1421 | 17193 | 17212 | CCTGGCATTAGCAACGGCTC | 74 | 444 |
| 1201110 | 1446 | 1465 | 17237 | 17256 | AGTCCAGATTAACCAATGGT | 27 | 445 |
| 1201116 | 1557 | 1576 | 17348 | 17367 | TAGTATACTGAGCTCTAGCT | 35 | 446 |
| 1201122 | 1637 | 1656 | 17428 | 17447 | CCTGGCAGAAATGTTGTCGG | 57 | 447 |
| 1201128 | 1739 | 1758 | 17530 | 17549 | CGGTACACACAGAGCTCATG | 50 | 448 |
| 1201134 | 1781 | 1800 | 17572 | 17591 | GTGTAGCCCATACTGTGAAA | 22 | 449 |
| 1201140 | 1954 | 1973 | 17745 | 17764 | AGGGTCCTTTAAACATCTAA | 29 | 450 |
| 1201142 | 1963 | 1982 | 17754 | 17773 | GCCACATATAGGGTCCTTTA | 8 | 66 |
| 1201147 | 2120 | 2139 | 17911 | 17930 | ATCCTCTATGATGATGGTGC | 74 | 451 |
| 1201153 | 2601 | 2620 | 18392 | 18411 | TTGTAAGCCTAAGGACCACG | 34 | 452 |
| 1201159 | 2656 | 2675 | 18447 | 18466 | AAGACCTGTTAATGGTGTCC | 33 | 453 |
| 1201165 | N/A | N/A | 3589 | 3608 | GGCACCCTTGCGCCTGGGAC | 79 | 454 |
| 1201171 | N/A | N/A | 3687 | 3706 | AGCGGAGACCAGCGCAGCCG | 82 | 455 |
| 1201177 | N/A | N/A | 3699 | 3718 | CCGCCTCACCCGAGCGGAGA | 98 | 456 |
| 1201183 | N/A | N/A | 3712 | 3731 | AAGCGAAGCCAAGCCGCCTC | 92 | 457 |
| 1201189 | N/A | N/A | 3845 | 3864 | TCGCCCGCTGGGCCGGACCC | 67 | 458 |
| 1201195 | N/A | N/A | 3871 | 3890 | TCCCGGAGTTCCCTGGGCGC | 101 | 459 |
| 1201203 | N/A | N/A | 3898 | 3917 | GCGCCCTGCGGAGCCCGCTG | 93 | 460 |
| 1201209 | N/A | N/A | 4070 | 4089 | CGGAACTCCCCCGGCGGGCG | 66 | 461 |
| 1201215 | N/A | N/A | 4080 | 4099 | CCGAGGCTCCCGGAACTCCC | 119 | 462 |
| 1201221 | N/A | N/A | 4164 | 4183 | AGCCCCCCTCGGAGAAGCTC | 78 | 463 |
| 1201227 | N/A | N/A | 4205 | 4224 | TGGGCCGCTTCTCCAGGCGG | 71 | 464 |
| 1201233 | N/A | N/A | 4452 | 4471 | GGAGACCGGTGACCCAAGGG | 52 | 465 |
| 1201239 | N/A | N/A | 4720 | 4739 | CGCGGCCATGAAGATCCTCA | 79 | 466 |
| 1201245 | N/A | N/A | 5242 | 5261 | GTTTTGGGCAACCTTCCAGC | 50 | 467 |
| 1201251 | N/A | N/A | 5743 | 5762 | GTGCAGTTAATAACCCACTT | 42 | 468 |
| 1201257 | N/A | N/A | 6343 | 6362 | ACAGATGCACCCGAGTGGCC | 67 | 469 |
| 1201263 | N/A | N/A | 6640 | 6659 | GTGGATATAGTTGCCTTGGA | 19 | 470 |
| 1201269 | N/A | N/A | 6942 | 6961 | TTCTCAGGGAATTGGCACCC | 69 | 471 |
| 1201275 | N/A | N/A | 7239 | 7258 | CGACCTTCACCCCATAATGT | 72 | 472 |
| 1201281 | N/A | N/A | 7327 | 7346 | AGGCACTAAAGCCTTCTAGC | 89 | 473 |
| 1201287 | N/A | N/A | 8977 | 8996 | GACTTACACTTCACTTAGAC | 68 | 474 |
| 1201293 | N/A | N/A | 9691 | 9710 | GCTCTATTAATAGGTTAGGA | 7 | 475 |
| 1201299 | N/A | N/A | 10074 | 10093 | GGACAAACTGGTGGAGGGTC | 75 | 476 |
| 1201305 | N/A | N/A | 10229 | 10248 | GGAGTCCATGCAGCTAGCAG | 62 | 477 |
| 1201311 | N/A | N/A | 10795 | 10814 | GGTGACCCACAACACATTAT | 84 | 478 |
| 1201317 | N/A | N/A | 11828 | 11847 | CGCTTATCAGGATAGCACAA | 63 | 479 |
| 1201323 | N/A | N/A | 13538 | 13557 | GCAATTAGTGTGATCATGCA | 58 | 480 |
| 1201329 | N/A | N/A | 13749 | 13768 | GTGGCCTAGTCCTCTGGCAT | 80 | 481 |
| 1201335 | N/A | N/A | 13764 | 13783 | GTCACCAGTCAAGTAGTGGC | 97 | 482 |
| 1201341 | N/A | N/A | 13997 | 14016 | AGGGAATGACACTGAGTCGG | 69 | 483 |
| 1201347 | N/A | N/A | 14623 | 14642 | GGGCCCCATGTAACCTGGTT | 86 | 484 |
| 1201353 | N/A | N/A | 14719 | 14738 | CTCTTAATATGCGGGTCACA | 47 | 485 |
| 1201359 | N/A | N/A | 14817 | 14836 | CCATCTTATTCGGTGCTTCC | 32 | 486 |
| 1201365 | N/A | N/A | 14908 | 14927 | CCAGCATACATTGGATCTAT | 30 | 487 |
| 1201371 | N/A | N/A | 15188 | 15207 | GTACTCAGGTCATGCCAGTT | 29 | 488 |
| 1201377 | N/A | N/A | 16166 | 16185 | GAGTCCCATATTTATGTTGA | 84 | 489 |

TABLE 8
Reduction of PRNP RNA

| | SEQ ID | SEQ ID | SEQ ID | SEQ ID | | | |
|---|---|---|---|---|---|---|---|
| | NO: 1 | NO: 1 | NO: 2 | NO: 2 | | PRNP | |
| Compound | Start | Stop | Start | Stop | | (% UTC) | SEQ ID |
| ID | Site | Site | Site | Site | Sequence (5′ to 3′) | RTS42354 | NO |
| 1201142 | 1963 | 1982 | 17754 | 17773 | GCCACATATAGGGTCCTTTA | 11 | 66 |
| 1238115 | 38 | 57 | 3131 | 3150 | TGGAAATTCGGCCCAAAGCT | 97 | 490 |
| 1238137 | 70 | 89 | 3163 | 3182 | GTGGCTCATTGACTGTAAAA | 112 | 491 |
| 1238159 | 148 | 167 | 3241 | 3260 | CACCGGAAAAAACGAGTTGA | 101 | 492 |
| 1238181 | 607 | 626 | 16398 | 16417 | CCCCAGCCACCACCATGAGG | 58 | 493 |
| | 631 | 650 | 16422 | 16441 | | | |
| | 679 | 698 | 16470 | 16489 | | | |
| 1238203 | 742 | 761 | 16533 | 16552 | TGCTTCATGTTGGTTTTTGG | 18 | 494 |
| 1238225 | 1183 | 1202 | 16974 | 16993 | GAAGACCTTCCTCATCCCAC | 84 | 495 |
| 1238247 | 1358 | 1377 | 17149 | 17168 | TTGACCAGCATCTCAGGTCT | 107 | 496 |
| 1238269 | 1497 | 1516 | 17288 | 17307 | CTGTTCTGAGATTTGTTTTA | 25 | 497 |
| 1238291 | 1658 | 1677 | 17449 | 17468 | ATCATGTGGCCTCCTAACAA | 30 | 498 |
| 1238313 | 1801 | 1820 | 17592 | 17611 | ACTCTTGTTGAACAGCTGCT | 13 | 499 |
| 1238335 | 1830 | 1849 | 17621 | 17640 | GCCAGAGGTTCAGTGTTGTG | 19 | 500 |
| 1238357 | 1874 | 1893 | 17665 | 17684 | TTTCATATATGTTACAGTTA | 34 | 501 |
| 1238379 | 1910 | 1929 | 17701 | 17720 | CCATTCCCAAACATTTGATT | 87 | 502 |
| 1238401 | 1994 | 2013 | 17785 | 17804 | CCTTAATTACCTATAGTTTA | 34 | 503 |
| 1238423 | 2030 | 2049 | 17821 | 17840 | CCTTCAGTGTCTAGAAGGCA | 92 | 504 |
| 1238445 | 2080 | 2099 | 17871 | 17890 | TGTATGTCAAAATCATTCTG | 23 | 505 |
| 1238467 | 2115 | 2134 | 17906 | 17925 | CTATGATGATGGTGCTTTCA | 18 | 506 |
| 1238489 | 2145 | 2164 | 17936 | 17955 | ACACTGACCATTTTTTAATT | 46 | 507 |
| 1238511 | 2173 | 2192 | 17964 | 17983 | AAGAAATGCAAGCAGTTCTT | 54 | 508 |
| 1238533 | 2234 | 2253 | 18025 | 18044 | CAATTACAGAAACTATGAAC | 86 | 509 |
| 1238555 | 2265 | 2284 | 18056 | 18075 | AGATTGTCTCCCTATTCTTT | 29 | 510 |
| 1238577 | 2298 | 2317 | 18089 | 18108 | TATTTCTGTCATCTCCAACC | 33 | 511 |
| 1238599 | 2322 | 2341 | 18113 | 18132 | TCTTTTTCCACTTCAAATCA | 55 | 512 |
| 1238621 | 2367 | 2386 | 18158 | 18177 | AACAATTCAGGGAATAATTT | 82 | 513 |
| 1238643 | 2405 | 2424 | 18196 | 18215 | GCAGAAAAGTAATACATATC | 25 | 514 |
| 1238665 | 2510 | 2529 | 18301 | 18320 | ACTGCTCTAAACAAAACTCC | 76 | 515 |
| 1238687 | 2566 | 2585 | 18357 | 18376 | CATATTAAGTATTCAGTACC | 61 | 516 |
| 1238709 | 2710 | 2729 | 18501 | 18520 | ACAAGAACATGCAAAGTTAC | 67 | 517 |
| 1238731 | N/A | N/A | 4714 | 4733 | CATGAAGATCCTCATCATTA | 72 | 518 |
| 1238753 | N/A | N/A | 4813 | 4832 | CTACCAGGAGTTTTCCCTAA | 66 | 519 |
| 1238775 | N/A | N/A | 4851 | 4870 | TTTTGATAATTATATTTGTA | 78 | 520 |
| 1238797 | N/A | N/A | 4892 | 4911 | CCAGAAGTTTAACATATTTA | 17 | 521 |
| 1238819 | N/A | N/A | 4959 | 4978 | AAAATTGCTCCTTTCCACTG | 54 | 522 |
| 1238841 | N/A | N/A | 5009 | 5028 | TACTGGTTAGCTTTTTTTCA | 41 | 523 |
| 1238863 | N/A | N/A | 5076 | 5095 | TGGAAGACTTGTGTTAGATA | 2 | 524 |
| 1238885 | N/A | N/A | 5119 | 5138 | TTTGCCATTTATCTATTATA | 37 | 525 |
| 1238907 | N/A | N/A | 5164 | 5183 | CAAACATGCTCTAATTTGCA | 49 | 526 |
| 1238929 | N/A | N/A | 5303 | 5322 | TGCAGAACCATCTTTGTGAC | 73 | 527 |
| 1238951 | N/A | N/A | 5414 | 5433 | CAATAACTCATACATACAGA | 57 | 528 |
| 1238973 | N/A | N/A | 5518 | 5537 | GCAGGTAAGTTCTCAGGAGT | 19 | 529 |
| 1238995 | N/A | N/A | 5639 | 5658 | TGTCATAATTTTCTTAGCTA | 16 | 530 |
| 1239017 | N/A | N/A | 5691 | 5710 | GGCTCCAAAATCATGATTTT | 81 | 531 |
| 1239039 | N/A | N/A | 5736 | 5755 | TAATAACCCACTTTTTTACT | 93 | 532 |
| 1239061 | N/A | N/A | 5846 | 5865 | ACCAAAGGAAAATTAAGATC | 66 | 533 |
| 1239083 | N/A | N/A | 5982 | 6001 | GCTAAAAATCTTTTATTCTA | 85 | 534 |
| 1239105 | N/A | N/A | 6290 | 6309 | TGACCCTCATTTTCTGTGAC | 57 | 535 |
| 1239127 | N/A | N/A | 6425 | 6444 | TAATTCTAAAAATCTGTGGC | 58 | 536 |
| 1239149 | N/A | N/A | 6502 | 6521 | CAGAAACTTCTGTTATGTTA | 26 | 537 |
| 1239171 | N/A | N/A | 6689 | 6708 | TGGGTTAGATACAGACATGT | 40 | 538 |
| 1239193 | N/A | N/A | 6856 | 6875 | AGGATTACCTCCCTTAAAGT | 80 | 539 |
| 1239215 | N/A | N/A | 7199 | 7218 | AGTAAATTCCCTTGTTATAT | 65 | 540 |
| 1239237 | N/A | N/A | 7621 | 7640 | CATTATGAAATTATACTCAA | 95 | 541 |
| 1239259 | N/A | N/A | 8160 | 8179 | CTATCTTTCTATTTGTGTCT | 28 | 542 |
| 1239281 | N/A | N/A | 8330 | 8349 | TTAGATCTGAAACGAGACAA | 81 | 543 |
| 1239303 | N/A | N/A | 8642 | 8661 | GAAGCAAATTCAACAGCTCA | 87 | 544 |
| 1239325 | N/A | N/A | 8982 | 9001 | CATCAGACTTACACTTCACT | 60 | 545 |
| 1239347 | N/A | N/A | 9355 | 9374 | GGTGGTAGTTTTTCAAATCA | 18 | 546 |
| 1239369 | N/A | N/A | 9565 | 9584 | GGATAGTCTCTTTCCATCAT | 37 | 547 |
| 1239391 | N/A | N/A | 9879 | 9898 | AGGGTCAAAATTCAATGCTA | 42 | 548 |
| 1239413 | N/A | N/A | 10678 | 10697 | ACACAGTTTTGAATAAGATA | 76 | 549 |
| 1239435 | N/A | N/A | 10781 | 10800 | CATTATTGTGCCACCAAGCC | 86 | 550 |
| 1239457 | N/A | N/A | 12411 | 12430 | TTCTTTGCAGGGATATGCAA | 91 | 551 |
| 1239479 | N/A | N/A | 13523 | 13542 | ATGCACATAGAAAATCCAAC | 66 | 552 |
| 1239501 | N/A | N/A | 13736 | 13755 | CTGGCATATTTCAAGATATC | 63 | 553 |
| 1239523 | N/A | N/A | 14136 | 14155 | TAGTATTTTTGACAATGGCC | 29 | 554 |
| 1239545 | N/A | N/A | 14368 | 14387 | TGCTTATTATTCATGTTCTC | 36 | 555 |
| 1239567 | N/A | N/A | 14697 | 14716 | ATGCCACTTCCCTTGTCCCT | 67 | 556 |
| 1239589 | N/A | N/A | 14920 | 14939 | GAATTTTCTCTCCCAGCATA | 73 | 557 |
| 1239611 | N/A | N/A | 15212 | 15231 | TTGAAAGTTACAAGCAGAGT | 52 | 558 |
| 1239633 | N/A | N/A | 15334 | 15353 | AACTGGATAATATTCATAAA | 84 | 559 |
| 1239655 | N/A | N/A | 15411 | 15430 | CCTTTATCACCCAATTAGCT | 71 | 560 |
| 1239677 | N/A | N/A | 15489 | 15508 | TTTTAGTACATTTAATGAAA | 92 | 561 |
| 1239699 | N/A | N/A | 15672 | 15691 | TATAATGGCATATACTGGAA | 58 | 562 |
| 1239721 | N/A | N/A | 15738 | 15757 | AAACAGTACCTGCTGTACCC | 76 | 563 |
| 1239743 | N/A | N/A | 15823 | 15842 | AATCTCTTTTCAAATTAAAG | 83 | 564 |
| 1239765 | N/A | N/A | 15854 | 15873 | CCTTTGGAGAATGTACATTC | 41 | 565 |
| 1239787 | N/A | N/A | 15913 | 15932 | TTCTAATTTTTGTACCAAAA | 63 | 566 |

TABLE 9
Reduction of PRNP RNA

| | SEQ ID | SEQ ID | SEQ ID | SEQ ID | | | |
|---|---|---|---|---|---|---|---|
| | NO: 1 | NO: 1 | NO: 2 | NO: 2 | | PRNP | |
| Compound | Start | Stop | Start | Stop | | (% UTC) | SEQ ID |
| ID | Site | Site | Site | Site | Sequence (5′ to 3′) | RTS42354 | NO |
| 1201142 | 1963 | 1982 | 17754 | 17773 | GCCACATATAGGGTCCTTTA | 6 | 66 |
| 1238116 | 39 | 58 | 3132 | 3151 | TTGGAAATTCGGCCCAAAGC | 79 | 567 |
| 1238138 | 71 | 90 | 3164 | 3183 | CGTGGCTCATTGACTGTAAA | 77 | 568 |
| 1238160 | 150 | 169 | 3243 | 3262 | GTCACCGGAAAAAACGAGTT | 109 | 569 |
| 1238182 | 608 | 627 | 16399 | 16418 | CCCCCAGCCACCACCATGAG | 75 | 570 |
| | 632 | 651 | 16423 | 16442 | | | |
| 1238204 | 747 | 766 | 16538 | 16557 | CCATGTGCTTCATGTTGGTT | 61 | 571 |
| 1238226 | 1184 | 1203 | 16975 | 16994 | GGAAGACCTTCCTCATCCCA | 85 | 572 |
| 1238248 | 1359 | 1378 | 17150 | 17169 | CTTGACCAGCATCTCAGGTC | 84 | 573 |
| 1238270 | 1514 | 1533 | 17305 | 17324 | GGCAAAGGTATTTCAGACTG | 8 | 574 |
| 1238292 | 1659 | 1678 | 17450 | 17469 | TATCATGTGGCCTCCTAACA | 40 | 575 |
| 1238314 | 1802 | 1821 | 17593 | 17612 | TACTCTTGTTGAACAGCTGC | 17 | 576 |
| 1238336 | 1845 | 1864 | 17636 | 17655 | TGAATATGTCCTCTAGCCAG | 31 | 577 |
| 1238358 | 1875 | 1894 | 17666 | 17685 | CTTTCATATATGTTACAGTT | 11 | 578 |
| 1238380 | 1911 | 1930 | 17702 | 17721 | ACCATTCCCAAACATTTGAT | 83 | 579 |
| 1238402 | 1995 | 2014 | 17786 | 17805 | GCCTTAATTACCTATAGTTT | 13 | 580 |
| 1238424 | 2031 | 2050 | 17822 | 17841 | GCCTTCAGTGTCTAGAAGGC | 93 | 581 |
| 1238446 | 2081 | 2100 | 17872 | 17891 | CTGTATGTCAAAATCATTCT | 23 | 582 |
| 1238468 | 2117 | 2136 | 17908 | 17927 | CTCTATGATGATGGTGCTTT | 18 | 583 |
| 1238490 | 2147 | 2166 | 17938 | 17957 | GCACACTGACCATTTTTTAA | 9 | 584 |
| 1238512 | 2176 | 2195 | 17967 | 17986 | ATAAAGAAATGCAAGCAGTT | 42 | 585 |
| 1238534 | 2235 | 2254 | 18026 | 18045 | CCAATTACAGAAACTATGAA | 59 | 586 |
| 1238556 | 2266 | 2285 | 18057 | 18076 | TAGATTGTCTCCCTATTCTT | 59 | 587 |
| 1238578 | 2299 | 2318 | 18090 | 18109 | ATATTTCTGTCATCTCCAAC | 36 | 588 |
| 1238600 | 2326 | 2345 | 18117 | 18136 | AATTTCTTTTTCCACTTCAA | 14 | 589 |
| 1238622 | 2372 | 2391 | 18163 | 18182 | TATCAAACAATTCAGGGAAT | 34 | 590 |
| 1238644 | 2409 | 2428 | 18200 | 18219 | CATTGCAGAAAAGTAATACA | 66 | 591 |
| 1238666 | 2512 | 2531 | 18303 | 18322 | TAACTGCTCTAAACAAAACT | 85 | 592 |
| 1238688 | 2574 | 2593 | 18365 | 18384 | GTTTCCCACATATTAAGTAT | 22 | 593 |
| 1238710 | 2716 | 2735 | 18507 | 18526 | AACAAAACAAGAACATGCAA | 74 | 594 |
| 1238732 | N/A | N/A | 4715 | 4734 | CCATGAAGATCCTCATCATT | 84 | 595 |
| 1238754 | N/A | N/A | 4814 | 4833 | TCTACCAGGAGTTTTCCCTA | 86 | 596 |
| 1238776 | N/A | N/A | 4858 | 4877 | CCTATGTTTTTGATAATTAT | 65 | 597 |
| 1238798 | N/A | N/A | 4893 | 4912 | TCCAGAAGTTTAACATATTT | 58 | 598 |
| 1238820 | N/A | N/A | 4960 | 4979 | TAAAATTGCTCCTTTCCACT | 58 | 599 |
| 1238842 | N/A | N/A | 5020 | 5039 | GCTTTTCCCCTTACTGGTTA | 34 | 600 |
| 1238864 | N/A | N/A | 5077 | 5096 | GTGGAAGACTTGTGTTAGAT | 3 | 601 |
| 1238886 | N/A | N/A | 5121 | 5140 | ATTTTGCCATTTATCTATTA | 42 | 602 |
| 1238908 | N/A | N/A | 5172 | 5191 | TGATAACCCAAACATGCTCT | 47 | 603 |
| 1238930 | N/A | N/A | 5304 | 5323 | CTGCAGAACCATCTTTGTGA | 77 | 604 |
| 1238952 | N/A | N/A | 5416 | 5435 | CCCAATAACTCATACATACA | 72 | 605 |
| 1238974 | N/A | N/A | 5520 | 5539 | TTGCAGGTAAGTTCTCAGGA | 4 | 606 |
| 1238996 | N/A | N/A | 5641 | 5660 | TGTGTCATAATTTTCTTAGC | 9 | 607 |
| 1239018 | N/A | N/A | 5693 | 5712 | CAGGCTCCAAAATCATGATT | 54 | 608 |
| 1239040 | N/A | N/A | 5738 | 5757 | GTTAATAACCCACTTTTTTA | 96 | 609 |
| 1239062 | N/A | N/A | 5857 | 5876 | GCAATATATTCACCAAAGGA | 10 | 610 |
| 1239084 | N/A | N/A | 5983 | 6002 | GGCTAAAAATCTTTTATTCT | 49 | 611 |
| 1239106 | N/A | N/A | 6292 | 6311 | CCTGACCCTCATTTTCTGTG | 69 | 612 |
| 1239128 | N/A | N/A | 6427 | 6446 | CATAATTCTAAAAATCTGTG | 76 | 613 |
| 1239150 | N/A | N/A | 6503 | 6522 | GCAGAAACTTCTGTTATGTT | 37 | 614 |
| 1239172 | N/A | N/A | 6699 | 6718 | TAGCCATCACTGGGTTAGAT | 37 | 615 |
| 1239194 | N/A | N/A | 6858 | 6877 | GAAGGATTACCTCCCTTAAA | 81 | 616 |
| 1239216 | N/A | N/A | 7203 | 7222 | GCTAAGTAAATTCCCTTGTT | 45 | 617 |
| 1239238 | N/A | N/A | 7622 | 7641 | ACATTATGAAATTATACTCA | 74 | 618 |
| 1239260 | N/A | N/A | 8161 | 8180 | GCTATCTTTCTATTTGTGTC | 22 | 619 |
| 1239282 | N/A | N/A | 8344 | 8363 | GAGAGCTTTTCCTCTTAGAT | 78 | 620 |
| 1239304 | N/A | N/A | 8643 | 8662 | CGAAGCAAATTCAACAGCTC | 63 | 621 |
| 1239326 | N/A | N/A | 8983 | 9002 | GCATCAGACTTACACTTCAC | 19 | 622 |
| 1239348 | N/A | N/A | 9368 | 9387 | ATGAGCTCAACAGGGTGGTA | 69 | 623 |
| 1239370 | N/A | N/A | 9566 | 9585 | AGGATAGTCTCTTTCCATCA | 28 | 624 |
| 1239392 | N/A | N/A | 9939 | 9958 | GTAGAGATAAACATTTGGGC | 17 | 625 |
| 1239414 | N/A | N/A | 10679 | 10698 | GACACAGTTTTGAATAAGAT | 44 | 626 |
| 1239436 | N/A | N/A | 10787 | 10806 | ACAACACATTATTGTGCCAC | 74 | 627 |
| 1239458 | N/A | N/A | 12454 | 12473 | TGCTATCGAATACTATGCAG | 93 | 628 |
| 1239480 | N/A | N/A | 13531 | 13550 | GTGTGATCATGCACATAGAA | 67 | 629 |
| 1239502 | N/A | N/A | 13738 | 13757 | CTCTGGCATATTICAAGATA | 72 | 630 |
| 1239524 | N/A | N/A | 14158 | 14177 | CCATATTTATAAATTTACAA | 75 | 631 |
| 1239546 | N/A | N/A | 14369 | 14388 | GTGCTTATTATTCATGTTCT | 27 | 632 |
| 1239568 | N/A | N/A | 14779 | 14798 | TCTTCAACAGCCTCCCAACC | 74 | 633 |
| 1239590 | N/A | N/A | 14921 | 14940 | TGAATTTTCTCTCCCAGCAT | 75 | 634 |
| 1239612 | N/A | N/A | 15218 | 15237 | ATATATTTGAAAGTTACAAG | 77 | 635 |
| 1239634 | N/A | N/A | 15345 | 15364 | GCTAATGATTAAACTGGATA | 45 | 636 |
| 1239656 | N/A | N/A | 15414 | 15433 | TTACCTTTATCACCCAATTA | 97 | 637 |
| 1239678 | N/A | N/A | 15491 | 15510 | GTTTTTAGTACATTTAATGA | 72 | 638 |
| 1239700 | N/A | N/A | 15673 | 15692 | CTATAATGGCATATACTGGA | 31 | 639 |
| 1239722 | N/A | N/A | 15739 | 15758 | TAAACAGTACCTGCTGTACC | 89 | 640 |
| 1239744 | N/A | N/A | 15825 | 15844 | AAAATCTCTTTTCAAATTAA | 74 | 641 |
| 1239766 | N/A | N/A | 15863 | 15882 | ATTTATGACCCTTTGGAGAA | 85 | 642 |
| 1239788 | N/A | N/A | 15914 | 15933 | CTTCTAATTTTTGTACCAAA | 27 | 643 |

TABLE 10
Reduction of PRNP RNA

| | SEQ ID | SEQ ID | SEQ ID | SEQ ID | | | |
|---|---|---|---|---|---|---|---|
| | NO: 1 | NO: 1 | NO: 2 | NO: 2 | | PRNP | |
| Compound | Start | Stop | Start | Stop | | (% UTC) | SEQ ID |
| ID | Site | Site | Site | Site | Sequence (5′ to 3′) | RTS42354 | NO |
| 1201142 | 1963 | 1982 | 17754 | 17773 | GCCACATATAGGGTCCTTTA | 11 | 66 |
| 1238117 | 42 | 61 | 3135 | 3154 | TAATTGGAAATTCGGCCCAA | 92 | 644 |
| 1238139 | 103 | 122 | 3196 | 3215 | TGATACCGCCTGCGGGTGCC | 99 | 645 |
| 1238161 | 151 | 170 | 3244 | 3263 | AGTCACCGGAAAAAACGAGT | 105 | 646 |
| 1238183 | 609 | 628 | 16400 | 16419 | GCCCCCAGCCACCACCATGA | 55 | 647 |
| | 633 | 652 | 16424 | 16443 | | | |
| 1238205 | 786 | 805 | 16577 | 16596 | CAAGGCCCCCCACCACTGCC | 95 | 648 |
| 1238227 | 1185 | 1204 | 16976 | 16995 | AGGAAGACCTTCCTCATCCC | 82 | 649 |
| 1238249 | 1383 | 1402 | 17174 | 17193 | CATGATGAACTCAATCAAAG | 45 | 650 |
| 1238271 | 1521 | 1540 | 17312 | 17331 | GTATCCAGGCAAAGGTATTT | 19 | 651 |
| 1238293 | 1661 | 1680 | 17452 | 17471 | AGTATCATGTGGCCTCCTAA | 12 | 652 |
| 1238315 | 1804 | 1823 | 17595 | 17614 | TTTACTCTTGTTGAACAGCT | 15 | 653 |
| 1238337 | 1847 | 1866 | 17638 | 17657 | TGTGAATATGTCCTCTAGCC | 21 | 654 |
| 1238359 | 1876 | 1895 | 17667 | 17686 | CCTTTCATATATGTTACAGT | 7 | 655 |
| 1238381 | 1912 | 1931 | 17703 | 17722 | CACCATTCCCAAACATTTGA | 87 | 656 |
| 1238403 | 1996 | 2015 | 17787 | 17806 | TGCCTTAATTACCTATAGTT | 45 | 657 |
| 1238425 | 2037 | 2056 | 17828 | 17847 | AGATTTGCCTTCAGTGTCTA | 110 | 658 |
| 1238447 | 2082 | 2101 | 17873 | 17892 | CCTGTATGTCAAAATCATTC | 37 | 659 |
| 1238469 | 2118 | 2137 | 17909 | 17928 | CCTCTATGATGATGGTGCTT | 22 | 660 |
| 1238491 | 2148 | 2167 | 17939 | 17958 | TGCACACTGACCATTTTTTA | 18 | 661 |
| 1238513 | 2188 | 2207 | 17979 | 17998 | TATGAGACAGAAATAAAGAA | 71 | 662 |
| 1238535 | 2240 | 2259 | 18031 | 18050 | AAAAGCCAATTACAGAAACT | 81 | 663 |
| 1238557 | 2267 | 2286 | 18058 | 18077 | TTAGATTGTCTCCCTATTCT | 54 | 664 |
| 1238579 | 2300 | 2319 | 18091 | 18110 | CATATTTCTGTCATCTCCAA | 37 | 665 |
| 1238601 | 2327 | 2346 | 18118 | 18137 | GAATTTCTTTTTCCACTTCA | 25 | 666 |
| 1238623 | 2373 | 2392 | 18164 | 18183 | ATATCAAACAATTCAGGGAA | 58 | 667 |
| 1238645 | 2420 | 2439 | 18211 | 18230 | GCCAATAATAACATTGCAGA | 21 | 668 |
| 1238667 | 2513 | 2532 | 18304 | 18323 | TTAACTGCTCTAAACAAAAC | 105 | 669 |
| 1238689 | 2575 | 2594 | 18366 | 18385 | GGTTTCCCACATATTAAGTA | 25 | 670 |
| 1238711 | 2720 | 2739 | 18511 | 18530 | ATATAACAAAACAAGAACAT | 74 | 671 |
| 1238733 | N/A | N/A | 4716 | 4735 | GCCATGAAGATCCTCATCAT | 63 | 672 |
| 1238755 | N/A | N/A | 4820 | 4839 | TCCTATTCTACCAGGAGTTT | 88 | 673 |
| 1238777 | N/A | N/A | 4859 | 4878 | TCCTATGTTTTTGATAATTA | 81 | 674 |
| 1238799 | N/A | N/A | 4895 | 4914 | TTTCCAGAAGTTTAACATAT | 62 | 675 |
| 1238821 | N/A | N/A | 4961 | 4980 | GTAAAATTGCTCCTTTCCAC | 53 | 676 |
| 1238843 | N/A | N/A | 5021 | 5040 | TGCTTTTCCCCTTACTGGTT | 53 | 677 |
| 1238865 | N/A | N/A | 5094 | 5113 | AATATTTTCCTTTCGGTGTG | 46 | 678 |
| 1238887 | N/A | N/A | 5122 | 5141 | CATTTTGCCATTTATCTATT | 54 | 679 |
| 1238909 | N/A | N/A | 5173 | 5192 | ATGATAACCCAAACATGCTC | 65 | 680 |
| 1238931 | N/A | N/A | 5306 | 5325 | GACTGCAGAACCATCTTTGT | 64 | 681 |
| 1238953 | N/A | N/A | 5417 | 5436 | CCCCAATAACTCATACATAC | 66 | 682 |
| 1238975 | N/A | N/A | 5535 | 5554 | TGTTTGTTTCTTCCATTGCA | 12 | 683 |
| 1238997 | N/A | N/A | 5642 | 5661 | ATGTGTCATAATTTTCTTAG | 18 | 684 |
| 1239019 | N/A | N/A | 5694 | 5713 | ACAGGCTCCAAAATCATGAT | 41 | 685 |
| 1239041 | N/A | N/A | 5739 | 5758 | AGTTAATAACCCACTTTTTT | 78 | 686 |
| 1239063 | N/A | N/A | 5859 | 5878 | GAGCAATATATTCACCAAAG | 7 | 687 |
| 1239085 | N/A | N/A | 5986 | 6005 | GTTGGCTAAAAATCTTTTAT | 33 | 688 |
| 1239107 | N/A | N/A | 6301 | 6320 | ACAGCCTTTCCTGACCCTCA | 50 | 689 |
| 1239129 | N/A | N/A | 6428 | 6447 | GCATAATTCTAAAAATCTGT | 70 | 690 |
| 1239151 | N/A | N/A | 6504 | 6523 | TGCAGAAACTTCTGTTATGT | 62 | 691 |
| 1239173 | N/A | N/A | 6703 | 6722 | GCTGTAGCCATCACTGGGTT | 46 | 692 |
| 1239195 | N/A | N/A | 6859 | 6878 | TGAAGGATTACCTCCCTTAA | 82 | 693 |
| 1239217 | N/A | N/A | 7219 | 7238 | CCCTTGTCTCTTCTGAGCTA | 73 | 694 |
| 1239239 | N/A | N/A | 7623 | 7642 | GACATTATGAAATTATACTC | 43 | 695 |
| 1239261 | N/A | N/A | 8162 | 8181 | GGCTATCTTTCTATTTGTGT | 47 | 696 |
| 1239283 | N/A | N/A | 8345 | 8364 | TGAGAGCTTTTCCTCTTAGA | 106 | 697 |
| 1239305 | N/A | N/A | 8644 | 8663 | GCGAAGCAAATTCAACAGCT | 62 | 698 |
| 1239327 | N/A | N/A | 8987 | 9006 | GGAGGCATCAGACTTACACT | 63 | 699 |
| 1239349 | N/A | N/A | 9371 | 9390 | TACATGAGCTCAACAGGGTG | 52 | 700 |
| 1239371 | N/A | N/A | 9567 | 9586 | AAGGATAGTCTCTTTCCATC | 44 | 701 |
| 1239393 | N/A | N/A | 9982 | 10001 | GGGAGTATCAATTTAAGCAA | 26 | 702 |
| 1239415 | N/A | N/A | 10719 | 10738 | GTCAGAATTCTAAGGGTCAA | 27 | 703 |
| 1239437 | N/A | N/A | 10790 | 10809 | CCCACAACACATTATTGTGC | 118 | 704 |
| 1239459 | N/A | N/A | 12463 | 12482 | GTACATATATGCTATCGAAT | 26 | 705 |
| 1239481 | N/A | N/A | 13536 | 13555 | AATTAGTGTGATCATGCACA | 61 | 706 |
| 1239503 | N/A | N/A | 13775 | 13794 | AGATACTCTCTGTCACCAGT | 71 | 707 |
| 1239525 | N/A | N/A | 14159 | 14178 | ACCATATTTATAAATTTACA | 92 | 708 |
| 1239547 | N/A | N/A | 14370 | 14389 | TGTGCTTATTATTCATGTTC | 39 | 709 |
| 1239569 | N/A | N/A | 14785 | 14804 | CTGATTTCTTCAACAGCCTC | 83 | 710 |
| 1239591 | N/A | N/A | 14922 | 14941 | CTGAATTTTCTCTCCCAGCA | 60 | 711 |
| 1239613 | N/A | N/A | 15236 | 15255 | GGTCATAAGCAAATCAAAAT | 26 | 712 |
| 1239635 | N/A | N/A | 15350 | 15369 | TCAGAGCTAATGATTAAACT | 54 | 713 |
| 1239657 | N/A | N/A | 15415 | 15434 | CTTACCTTTATCACCCAATT | 65 | 714 |
| 1239679 | N/A | N/A | 15493 | 15512 | TGGTTTTTAGTACATTTAAT | 39 | 715 |
| 1239701 | N/A | N/A | 15681 | 15700 | CGTAAAACCTATAATGGCAT | 53 | 716 |
| 1239723 | N/A | N/A | 15742 | 15761 | TGCTAAACAGTACCTGCTGT | 91 | 717 |
| 1239745 | N/A | N/A | 15828 | 15847 | TCAAAAATCTCTTTTCAAAT | 114 | 718 |
| 1239767 | N/A | N/A | 15872 | 15891 | AGAATGACAATTTATGACCC | 45 | 719 |
| 1239789 | N/A | N/A | 15916 | 15935 | TTCTTCTAATTTTTGTACCA | 47 | 720 |

TABLE 11
Reduction of PRNP RNA

| | SEQ ID | SEQ ID | SEQ ID | SEQ ID | | | |
|---|---|---|---|---|---|---|---|
| | NO: 1 | NO: 1 | NO: 2 | NO: 2 | | PRNP | |
| Compound | Start | Stop | Start | Stop | | (% UTC) | SEQ ID |
| ID | Site | Site | Site | Site | Sequence (5′ to 3′) | RTS42354 | NO |
| 1201142 | 1963 | 1982 | 17754 | 17773 | GCCACATATAGGGTCCTTTA | 9 | 66 |
| 1238118 | 45 | 64 | 3138 | 3157 | CTTTAATTGGAAATTCGGCC | 96 | 721 |
| 1238140 | 104 | 123 | 3197 | 3216 | TTGATACCGCCTGCGGGTGC | 78 | 722 |
| 1238162 | 451 | 470 | 16242 | 16261 | GCCACAAAGAGAACCAGCAT | 71 | 723 |
| 1238184 | 610 | 629 | 16401 | 16420 | TGCCCCCAGCCACCACCATG | 56 | 724 |
| | 634 | 653 | 16425 | 16444 | | | |
| 1238206 | 787 | 806 | 16578 | 16597 | CCAAGGCCCCCCACCACTGC | 102 | 725 |
| 1238228 | 1186 | 1205 | 16977 | 16996 | CAGGAAGACCTTCCTCATCC | 99 | 726 |
| 1238250 | 1384 | 1403 | 17175 | 17194 | TCATGATGAACTCAATCAAA | 40 | 727 |
| 1238272 | 1583 | 1602 | 17374 | 17393 | ATGAAATCTCTACTAAGATA | 57 | 728 |
| 1238294 | 1662 | 1681 | 17453 | 17472 | AAGTATCATGTGGCCTCCTA | 22 | 729 |
| 1238316 | 1805 | 1824 | 17596 | 17615 | ATTTACTCTTGTTGAACAGC | 10 | 730 |
| 1238338 | 1848 | 1867 | 17639 | 17658 | CTGTGAATATGTCCTCTAGC | 13 | 731 |
| 1238360 | 1877 | 1896 | 17668 | 17687 | GCCTTTCATATATGTTACAG | 12 | 732 |
| 1238382 | 1914 | 1933 | 17705 | 17724 | GGCACCATTCCCAAACATTT | 92 | 733 |
| 1238404 | 1997 | 2016 | 17788 | 17807 | CTGCCTTAATTACCTATAGT | 23 | 734 |
| 1238426 | 2038 | 2057 | 17829 | 17848 | GAGATTTGCCTTCAGTGTCT | 53 | 735 |
| 1238448 | 2087 | 2106 | 17878 | 17897 | GCTCTCCTGTATGTCAAAAT | 48 | 736 |
| 1238470 | 2122 | 2141 | 17913 | 17932 | TCATCCTCTATGATGATGGT | 67 | 737 |
| 1238492 | 2149 | 2168 | 17940 | 17959 | TTGCACACTGACCATTTTTT | 19 | 738 |
| 1238514 | 2189 | 2208 | 17980 | 17999 | TTATGAGACAGAAATAAAGA | 99 | 739 |
| 1238536 | 2241 | 2260 | 18032 | 18051 | CAAAAGCCAATTACAGAAAC | 80 | 740 |
| 1238558 | 2268 | 2287 | 18059 | 18078 | TTTAGATTGTCTCCCTATTC | 55 | 741 |
| 1238580 | 2301 | 2320 | 18092 | 18111 | TCATATTTCTGTCATCTCCA | 19 | 742 |
| 1238602 | 2328 | 2347 | 18119 | 18138 | AGAATTTCTTTTTCCACTTC | 25 | 743 |
| 1238624 | 2374 | 2393 | 18165 | 18184 | AATATCAAACAATTCAGGGA | 62 | 744 |
| 1238646 | 2422 | 2441 | 18213 | 18232 | AAGCCAATAATAACATTGCA | 47 | 745 |
| 1238668 | 2520 | 2539 | 18311 | 18330 | TCAGATGTTAACTGCTCTAA | 27 | 746 |
| 1238690 | 2576 | 2595 | 18367 | 18386 | GGGTTTCCCACATATTAAGT | 56 | 747 |
| 1238712 | 2721 | 2740 | 18512 | 18531 | TATATAACAAAACAAGAACA | 105 | 748 |
| 1238734 | N/A | N/A | 4741 | 4760 | GCTCTCAGAACAAGAAAATA | 73 | 749 |
| 1238756 | N/A | N/A | 4822 | 4841 | AATCCTATTCTACCAGGAGT | 79 | 750 |
| 1238778 | N/A | N/A | 4863 | 4882 | CTGTTCCTATGTTTTTGATA | 65 | 751 |
| 1238800 | N/A | N/A | 4899 | 4918 | GATTTTTCCAGAAGTTTAAC | 47 | 752 |
| 1238822 | N/A | N/A | 4962 | 4981 | AGTAAAATTGCTCCTTTCCA | 47 | 753 |
| 1238844 | N/A | N/A | 5038 | 5057 | CATCCTACCCCTCTGCCTGC | 82 | 754 |
| 1238866 | N/A | N/A | 5095 | 5114 | TAATATTTTCCTTTCGGTGT | 37 | 755 |
| 1238888 | N/A | N/A | 5123 | 5142 | TCATTTTGCCATTTATCTAT | 41 | 756 |
| 1238910 | N/A | N/A | 5175 | 5194 | AAATGATAACCCAAACATGC | 45 | 757 |
| 1238932 | N/A | N/A | 5322 | 5341 | CCAAGGTCACAAAATTGACT | 102 | 758 |
| 1238954 | N/A | N/A | 5423 | 5442 | AAATGCCCCCAATAACTCAT | 54 | 759 |
| 1238976 | N/A | N/A | 5554 | 5573 | ATACATGCCTGTTTTTGTTT | 60 | 760 |
| 1238998 | N/A | N/A | 5643 | 5662 | AATGTGTCATAATTTTCTTA | 24 | 761 |
| 1239020 | N/A | N/A | 5697 | 5716 | ATCACAGGCTCCAAAATCAT | 78 | 762 |
| 1239042 | N/A | N/A | 5741 | 5760 | GCAGTTAATAACCCACTTTT | 22 | 763 |
| 1239064 | N/A | N/A | 5860 | 5879 | AGAGCAATATATTCACCAAA | 10 | 764 |
| 1239086 | N/A | N/A | 5987 | 6006 | CGTTGGCTAAAAATCTTTTA | 29 | 765 |
| 1239108 | N/A | N/A | 6305 | 6324 | GATCACAGCCTTTCCTGACC | 50 | 766 |
| 1239130 | N/A | N/A | 6430 | 6449 | CAGCATAATTCTAAAAATCT | 99 | 767 |
| 1239152 | N/A | N/A | 6506 | 6525 | GGTGCAGAAACTTCTGTTAT | 58 | 768 |
| 1239174 | N/A | N/A | 6704 | 6723 | TGCTGTAGCCATCACTGGGT | 49 | 769 |
| 1239196 | N/A | N/A | 6860 | 6879 | CTGAAGGATTACCTCCCTTA | 78 | 770 |
| 1239218 | N/A | N/A | 7226 | 7245 | ATAATGTCCCTTGTCTCTTC | 44 | 771 |
| 1239240 | N/A | N/A | 7698 | 7717 | ACACAATACATATAATCTTA | 50 | 772 |
| 1239262 | N/A | N/A | 8163 | 8182 | AGGCTATCTTTCTATTTGTG | 38 | 773 |
| 1239284 | N/A | N/A | 8346 | 8365 | TTGAGAGCTTTTCCTCTTAG | 92 | 774 |
| 1239306 | N/A | N/A | 8646 | 8665 | TAGCGAAGCAAATTCAACAG | 78 | 775 |
| 1239328 | N/A | N/A | 9033 | 9052 | GATCTCTTAGATTTTTGGAC | 25 | 776 |
| 1239350 | N/A | N/A | 9380 | 9399 | TAGAATAAATACATGAGCTC | 92 | 777 |
| 1239372 | N/A | N/A | 9635 | 9654 | TGAAAATCAATATCATTCCT | 58 | 778 |
| 1239394 | N/A | N/A | 9983 | 10002 | TGGGAGTATCAATTTAAGCA | 15 | 779 |
| 1239416 | N/A | N/A | 10721 | 10740 | GTGTCAGAATTCTAAGGGTC | 29 | 780 |
| 1239438 | N/A | N/A | 10791 | 10810 | ACCCACAACACATTATTGTG | 83 | 781 |
| 1239460 | N/A | N/A | 12468 | 12487 | GTGTGGTACATATATGCTAT | 29 | 782 |
| 1239482 | N/A | N/A | 13542 | 13561 | ATTTGCAATTAGTGTGATCA | 83 | 783 |
| 1239504 | N/A | N/A | 13777 | 13796 | TAAGATACTCTCTGTCACCA | 57 | 784 |
| 1239526 | N/A | N/A | 14190 | 14209 | ACTAAATATTTATAATGGAT | 85 | 785 |
| 1239548 | N/A | N/A | 14371 | 14390 | CTGTGCTTATTATTCATGTT | 34 | 786 |
| 1239570 | N/A | N/A | 14792 | 14811 | TTCTCACCTGATTTCTTCAA | 88 | 787 |
| 1239592 | N/A | N/A | 14925 | 14944 | TGACTGAATTTTCTCTCCCA | 74 | 788 |
| 1239614 | N/A | N/A | 15237 | 15256 | TGGTCATAAGCAAATCAAAA | 30 | 789 |
| 1239636 | N/A | N/A | 15351 | 15370 | TTCAGAGCTAATGATTAAAC | 70 | 790 |
| 1239658 | N/A | N/A | 15416 | 15435 | CCTTACCTTTATCACCCAAT | 53 | 791 |
| 1239680 | N/A | N/A | 15507 | 15526 | CATGTACAGTTCAATGGTTT | 49 | 792 |
| 1239702 | N/A | N/A | 15682 | 15701 | CCGTAAAACCTATAATGGCA | 28 | 793 |
| 1239724 | N/A | N/A | 15745 | 15764 | GATTGCTAAACAGTACCTGC | 22 | 794 |
| 1239746 | N/A | N/A | 15829 | 15848 | ATCAAAAATCTCTTTTCAAA | 93 | 795 |
| 1239768 | N/A | N/A | 15873 | 15892 | CAGAATGACAATTTATGACC | 39 | 796 |
| 1239790 | N/A | N/A | 15917 | 15936 | TTTCTTCTAATTTTTGTACC | 74 | 797 |

TABLE 12
Reduction of PRNP RNA

| | SEQ ID | SEQ ID | SEQ ID | SEQ ID | | | |
|---|---|---|---|---|---|---|---|
| | NO: 1 | NO: 1 | NO: 2 | NO: 2 | | PRNP | |
| Compound | Start | Stop | Start | Stop | | (% UTC) | SEQ ID |
| ID | Site | Site | Site | Site | Sequence (5′ to 3′) | RTS42354 | NO |
| 1201142 | 1963 | 1982 | 17754 | 17773 | GCCACATATAGGGTCCTTTA | 7 | 66 |
| 1238122 | 51 | 70 | 3144 | 3163 | AATCATCTTTAATTGGAAAT | 108 | 798 |
| 1238144 | 120 | 139 | 3213 | 3232 | TGAACACTTGCATCAGTTGA | 87 | 799 |
| 1238166 | 468 | 487 | 16259 | 16278 | CCAGGTCACTCCATGTGGCC | 59* | 800 |
| 1238188 | 593 | 612 | 16384 | 16403 | ATGAGGCTGCCCCCAGCCAC | 75 | 801 |
| | 617 | 636 | 16408 | 16427 | | | |
| 1238210 | 858 | 877 | 16649 | 16668 | AGTAACGGTCCTCATAGTCA | 56 | 802 |
| 1238232 | 1199 | 1218 | 16990 | 17009 | AAGATGGTGAAAACAGGAAG | 67 | 803 |
| 1238254 | 1420 | 1439 | 17211 | 17230 | CTGTTATACTTTTACTGGCC | 21 | 804 |
| 1238276 | 1589 | 1608 | 17380 | 17399 | ATAGCTATGAAATCTCTACT | 32 | 805 |
| 1238298 | 1678 | 1697 | 17469 | 17488 | TAGGATTTTTTTGAATAAGT | 33 | 806 |
| 1238320 | 1811 | 1830 | 17602 | 17621 | GACAATATTTACTCTTGTTG | 14 | 807 |
| 1238342 | 1854 | 1873 | 17645 | 17664 | TGTTCACTGTGAATATGTCC | 12 | 808 |
| 1238364 | 1884 | 1903 | 17675 | 17694 | CCCAGAAGCCTTTCATATAT | 31 | 809 |
| 1238386 | 1920 | 1939 | 17711 | 17730 | TCCAAGGGCACCATTCCCAA | 97 | 810 |
| 1238408 | 2003 | 2022 | 17794 | 17813 | TTTCAGCTGCCTTAATTACC | 37 | 811 |
| 1238430 | 2042 | 2061 | 17833 | 17852 | AAAGGAGATTTGCCTTCAGT | 82 | 812 |
| 1238452 | 2092 | 2111 | 17883 | 17902 | CTGCAGCTCTCCTGTATGTC | 71 | 813 |
| 1238474 | 2126 | 2145 | 17917 | 17936 | TACATCATCCTCTATGATGA | 96 | 814 |
| 1238496 | 2155 | 2174 | 17946 | 17965 | TTTTCTTTGCACACTGACCA | 15 | 815 |
| 1238518 | 2209 | 2228 | 18000 | 18019 | CTAATTCTGGTTTTTGACAA | 61 | 816 |
| 1238540 | 2250 | 2269 | 18041 | 18060 | TCTTTGATTCAAAAGCCAAT | 51 | 817 |
| 1238562 | 2275 | 2294 | 18066 | 18085 | GATATTTTTTAGATTGTCTC | 42 | 818 |
| 1238584 | 2305 | 2324 | 18096 | 18115 | TCAATCATATTTCTGTCATC | 31 | 819 |
| 1238606 | 2334 | 2353 | 18125 | 18144 | ATTAACAGAATTTCTTTTTC | 86 | 820 |
| 1238628 | 2380 | 2399 | 18171 | 18190 | GGTGACAATATCAAACAATT | 18 | 821 |
| 1238650 | 2439 | 2458 | 18230 | 18249 | GAATACTCACAAAGTGCAAG | 37 | 822 |
| 1238672 | 2531 | 2550 | 18322 | 18341 | CATTAGACACTTCAGATGTT | 59 | 823 |
| 1238694 | 2621 | 2640 | 18412 | 18431 | ATGAAACGATTCAGTGCACA | 52 | 824 |
| 1238716 | 2730 | 2749 | 18521 | 18540 | CAATTTTTTTATATAACAAA | 85 | 825 |
| 1238738 | N/A | N/A | 4747 | 4766 | CGTGATGCTCTCAGAACAAG | 27 | 826 |
| 1238760 | N/A | N/A | 4828 | 4847 | ATCCTTAATCCTATTCTACC | 86 | 827 |
| 1238782 | N/A | N/A | 4876 | 4895 | TTTATCCAATTCCCTGTTCC | 67 | 828 |
| 1238804 | N/A | N/A | 4904 | 4923 | TTGTTGATTTTTCCAGAAGT | 28 | 829 |
| 1238826 | N/A | N/A | 4968 | 4987 | TGTGTAAGTAAAATTGCTCC | 41 | 830 |
| 1238848 | N/A | N/A | 5045 | 5064 | CAAATCACATCCTACCCCTC | 80 | 831 |
| 1238870 | N/A | N/A | 5100 | 5119 | AATCTTAATATTTTCCTTTC | 82 | 832 |
| 1238892 | N/A | N/A | 5132 | 5151 | AATGACTCATCATTTTGCCA | 28 | 833 |
| 1238914 | N/A | N/A | 5195 | 5214 | TGGTTATTTTAATAGATGTA | 18 | 834 |
| 1238936 | N/A | N/A | 5380 | 5399 | ATCATTTCCTCCATTCTATG | 69 | 835 |
| 1238958 | N/A | N/A | 5451 | 5470 | GCTTAACAAAATGTTTGTCA | 13 | 836 |
| 1238980 | N/A | N/A | 5581 | 5600 | TTCTAATTTTAGATCATTCT | 66 | 837 |
| 1239002 | N/A | N/A | 5655 | 5674 | TTCATTTCAGTTAATGTGTC | 23 | 838 |
| 1239024 | N/A | N/A | 5712 | 5731 | AGTTTTTCCCCACATATCAC | 50 | 839 |
| 1239046 | N/A | N/A | 5783 | 5802 | TTCAGATTTTTCACATATGC | 19 | 840 |
| 1239068 | N/A | N/A | 5865 | 5884 | TAGTGAGAGCAATATATTCA | 47 | 841 |
| 1239090 | N/A | N/A | 6141 | 6160 | GTTTTGAAAAATATTCAGGA | 53 | 842 |
| 1239112 | N/A | N/A | 6319 | 6338 | GATCAAGAGCTTGTGATCAC | 95 | 843 |
| 1239134 | N/A | N/A | 6443 | 6462 | CCCTTACATAATTCAGCATA | 68 | 844 |
| 1239156 | N/A | N/A | 6531 | 6550 | TGACAGCCATGTTCAGTGTC | 100 | 845 |
| 1239178 | N/A | N/A | 6725 | 6744 | CACTTAGGAGTTATTTTATA | 61 | 846 |
| 1239200 | N/A | N/A | 6878 | 6897 | CATTTATAATGCTTTTCACT | 70 | 847 |
| 1239222 | N/A | N/A | 7282 | 7301 | CTTAATTAGTTACATCGGGA | 9 | 848 |
| 1239244 | N/A | N/A | 7758 | 7777 | CGTGTGAGCATTCTTGTCTT | 81 | 849 |
| 1239266 | N/A | N/A | 8189 | 8208 | AACATTAATTATCCCCCCAT | 82 | 850 |
| 1239288 | N/A | N/A | 8417 | 8436 | CATTGTACCTCAACACAATA | 94 | 851 |
| 1239310 | N/A | N/A | 8751 | 8770 | ACCAGCATTATCCTGATGTC | 55 | 852 |
| 1239332 | N/A | N/A | 9067 | 9086 | TCAAAGGTAATTTTATAACC | 93 | 853 |
| 1239354 | N/A | N/A | 9422 | 9441 | CTAGGTATAATTTTTTTACC | 97 | 854 |
| 1239376 | N/A | N/A | 9652 | 9671 | TGTTGAAAAGTTTTCAATGA | 79 | 855 |
| 1239398 | N/A | N/A | 10096 | 10115 | GGTGATGCCATCTACTGAAA | 89 | 856 |
| 1239420 | N/A | N/A | 10736 | 10755 | TAACACACATTTCAAGTGTC | 92 | 857 |
| 1239442 | N/A | N/A | 11089 | 11108 | AGTACCATAACCTTTTTTTT | 53 | 858 |
| 1239464 | N/A | N/A | 12639 | 12658 | ACGGAAATATCATTCGACTC | 47 | 859 |
| 1239486 | N/A | N/A | 13554 | 13573 | CTAGCTGACACTATTTGCAA | 89 | 860 |
| 1239508 | N/A | N/A | 13879 | 13898 | AGAGGAGAAGAACCAGGCAC | 88 | 861 |
| 1239530 | N/A | N/A | 14214 | 14233 | GCATAAGGAATAATCAAACT | 57 | 862 |
| 1239552 | N/A | N/A | 14385 | 14404 | TTATGTTATTTCCTCTGTGC | 35 | 863 |
| 1239574 | N/A | N/A | 14812 | 14831 | TTATTCGGTGCTTCCATCAC | 68 | 864 |
| 1239596 | N/A | N/A | 14983 | 15002 | ATGTCAGCACCTTCTCCATT | 57 | 865 |
| 1239618 | N/A | N/A | 15270 | 15289 | CTAACATTATTGAAATGGGA | 42 | 866 |
| 1239640 | N/A | N/A | 15367 | 15386 | ATTATTTTTCATCTCCTTCA | 64 | 867 |
| 1239662 | N/A | N/A | 15420 | 15439 | AACCCCTTACCTTTATCACC | 52 | 868 |
| 1239684 | N/A | N/A | 15520 | 15539 | ATTCACCATATACCATGTAC | 51 | 869 |
| 1239706 | N/A | N/A | 15698 | 15717 | AAATCATCACTGTGTGCCGT | 42 | 870 |
| 1239728 | N/A | N/A | 15769 | 15788 | AGAGACCTATGACAATAGTA | 64 | 871 |
| 1239750 | N/A | N/A | 15834 | 15853 | ATCAAATCAAAAATCTCTTT | 91 | 872 |
| 1239772 | N/A | N/A | 15883 | 15902 | ATCAAACATCCAGAATGACA | 70 | 873 |
| 1239794 | N/A | N/A | 15949 | 15968 | GTTCATTATTTAACATTTTA | 74 | 874 |

TABLE 13
Reduction of PRNP RNA

| | SEQ ID | SEQ ID | SEQ ID | SEQ ID | | PRNP | PRNP | |
|---|---|---|---|---|---|---|---|---|
| | NO: 1 | NO: 1 | NO: 2 | NO: 2 | | (% UTC) | (% UTC) | SEQ |
| Compound | Start | Stop | Start | Stop | | RTS | RTS | ID |
| ID | Site | Site | Site | Site | Sequence (5′ to 3′) | 42354 | 42359 | NO |
| 1201142 | 1963 | 1982 | 17754 | 17773 | GCCACATATAGGGTCCTTTA | 8 | 12 | 66 |
| 1238123 | 54 | 73 | 3147 | 3166 | AAAAATCATCTTTAATTGGA | 92 | 88 | 875 |
| 1238145 | 121 | 140 | 3214 | 3233 | TTGAACACTTGCATCAGTTG | 81 | 86 | 876 |
| 1238167 | 508 | 527 | 16299 | 16318 | GTGTTCCATCCTCCAGGCTT | 5* | 71 | 877 |
| 1238189 | 594 | 613 | 16385 | 16404 | CATGAGGCTGCCCCCAGCCA | 84 | 233 | 878 |
| | 618 | 637 | 16409 | 16428 | | | | |
| 1238211 | 874 | 893 | 16665 | 16684 | TGCATGTTTTCACGATAGTA | 55 | 50 | 879 |
| 1238233 | 1264 | 1283 | 17055 | 17074 | TGAGACACCACCACTAAAAG | 68 | 72 | 880 |
| 1238255 | 1424 | 1443 | 17215 | 17234 | TTTGCTGTTATACTTTTACT | 13 | 14 | 881 |
| 1238277 | 1591 | 1610 | 17382 | 17401 | AAATAGCTATGAAATCTCTA | 31 | 40 | 882 |
| 1238299 | 1680 | 1699 | 17471 | 17490 | TCTAGGATTTTTTTGAATAA | 60 | 70 | 883 |
| 1238321 | 1812 | 1831 | 17603 | 17622 | TGACAATATTTACTCTTGTT | 13 | 13 | 884 |
| 1238343 | 1855 | 1874 | 17646 | 17665 | ATGTTCACTGTGAATATGTC | 27 | 26 | 885 |
| 1238365 | 1885 | 1904 | 17676 | 17695 | TCCCAGAAGCCTTTCATATA | 32 | 25 | 886 |
| 1238387 | 1921 | 1940 | 17712 | 17731 | CTCCAAGGGCACCATTCCCA | 85 | 79 | 887 |
| 1238409 | 2009 | 2028 | 17800 | 17819 | TTTACTTTTCAGCTGCCTTA | 9 | 10 | 888 |
| 1238431 | 2043 | 2062 | 17834 | 17853 | CAAAGGAGATTTGCCTTCAG | 71 | 68 | 889 |
| 1238453 | 2093 | 2112 | 17884 | 17903 | ACTGCAGCTCTCCTGTATGT | 84 | 94 | 890 |
| 1238475 | 2127 | 2146 | 17918 | 17937 | TTACATCATCCTCTATGATG | 89 | 94 | 891 |
| 1238497 | 2156 | 2175 | 17947 | 17966 | CTTTTCTTTGCACACTGACC | 8 | 10 | 892 |
| 1238519 | 2210 | 2229 | 18001 | 18020 | CCTAATTCTGGTTTTTGACA | 27 | 36 | 893 |
| 1238541 | 2251 | 2270 | 18042 | 18061 | TTCTTTGATTCAAAAGCCAA | 72 | 78 | 894 |
| 1238563 | 2276 | 2295 | 18067 | 18086 | AGATATTTTTTAGATTGTCT | 53 | 57 | 895 |
| 1238585 | 2306 | 2325 | 18097 | 18116 | ATCAATCATATTTCTGTCAT | 37 | 40 | 896 |
| 1238607 | 2339 | 2358 | 18130 | 18149 | TTAACATTAACAGAATTTCT | 66 | 56 | 897 |
| 1238629 | 2381 | 2400 | 18172 | 18191 | AGGTGACAATATCAAACAAT | 26 | 25 | 898 |
| 1238651 | 2440 | 2459 | 18231 | 18250 | AGAATACTCACAAAGTGCAA | 41 | 37 | 899 |
| 1238673 | 2532 | 2551 | 18323 | 18342 | GCATTAGACACTTCAGATGT | 35 | 43 | 900 |
| 1238695 | 2629 | 2648 | 18420 | 18439 | ATTCTTACATGAAACGATTC | 69 | 54 | 901 |
| 1238717 | 2732 | 2751 | 18523 | 18542 | TACAATTTTTTTATATAACA | 117 | 118 | 902 |
| 1238739 | N/A | N/A | 4748 | 4767 | CCGTGATGCTCTCAGAACAA | 31 | 31 | 903 |
| 1238761 | N/A | N/A | 4829 | 4848 | AATCCTTAATCCTATTCTAC | 91 | 74 | 904 |
| 1238783 | N/A | N/A | 4877 | 4896 | ATTTATCCAATTCCCTGTTC | 89 | 80 | 905 |
| 1238805 | N/A | N/A | 4905 | 4924 | GTTGTTGATTTTTCCAGAAG | 7 | 8 | 906 |
| 1238827 | N/A | N/A | 4969 | 4988 | TTGTGTAAGTAAAATTGCTC | 47 | 49 | 907 |
| 1238849 | N/A | N/A | 5046 | 5065 | ACAAATCACATCCTACCCCT | 96 | 89 | 908 |
| 1238871 | N/A | N/A | 5101 | 5120 | TAATCTTAATATTTTCCTTT | 113 | 115 | 909 |
| 1238893 | N/A | N/A | 5133 | 5152 | AAATGACTCATCATTTTGCC | 26 | 24 | 910 |
| 1238915 | N/A | N/A | 5196 | 5215 | TTGGTTATTTTAATAGATGT | 33 | 28 | 911 |
| 1238937 | N/A | N/A | 5382 | 5401 | CTATCATTTCCTCCATTCTA | 68 | 91 | 912 |
| 1238959 | N/A | N/A | 5452 | 5471 | TGCTTAACAAAATGTTTGTC | 67 | 58 | 913 |
| 1238981 | N/A | N/A | 5582 | 5601 | GTTCTAATTTTAGATCATTC | 19 | 22 | 914 |
| 1239003 | N/A | N/A | 5658 | 5677 | ATGTTCATTTCAGTTAATGT | 20 | 19 | 915 |
| 1239025 | N/A | N/A | 5713 | 5732 | CAGTTTTTCCCCACATATCA | 38 | 37 | 916 |
| 1239047 | N/A | N/A | 5784 | 5803 | TTTCAGATTTTTCACATATG | 34 | 40 | 917 |
| 1239069 | N/A | N/A | 5888 | 5907 | GTGAACTATTTTTTAAACGC | 35 | 31 | 918 |
| 1239091 | N/A | N/A | 6158 | 6177 | ATGGCTGAAATTGTTCAGTT | 75 | 53 | 919 |
| 1239113 | N/A | N/A | 6333 | 6352 | CCGAGTGGCCTCTGGATCAA | 58 | 69 | 920 |
| 1239135 | N/A | N/A | 6444 | 6463 | TCCCTTACATAATTCAGCAT | 59 | 63 | 921 |
| 1239157 | N/A | N/A | 6533 | 6552 | GTTGACAGCCATGTTCAGTG | 23 | 24 | 922 |
| 1239179 | N/A | N/A | 6736 | 6755 | CACACACTATTCACTTAGGA | 20 | 19 | 923 |
| 1239201 | N/A | N/A | 6879 | 6898 | ACATTTATAATGCTTTTCAC | 61 | 64 | 924 |
| 1239223 | N/A | N/A | 7286 | 7305 | GAAGCTTAATTAGTTACATC | 15 | 15 | 925 |
| 1239245 | N/A | N/A | 7788 | 7807 | TGCAGTACCATATGTTGAAT | 27 | 28 | 926 |
| 1239267 | N/A | N/A | 8190 | 8209 | CAACATTAATTATCCCCCCA | 67 | 77 | 927 |
| 1239289 | N/A | N/A | 8418 | 8437 | GCATTGTACCTCAACACAAT | 48 | 56 | 928 |
| 1239311 | N/A | N/A | 8805 | 8824 | CAAGTTTTTTTTCTAAGCAT | 48 | 37 | 929 |
| 1239333 | N/A | N/A | 9078 | 9097 | TCAGTCAGAATTCAAAGGTA | 41 | 32 | 930 |
| 1239355 | N/A | N/A | 9423 | 9442 | TCTAGGTATAATTTTTTTAC | 83 | 86 | 931 |
| 1239377 | N/A | N/A | 9668 | 9687 | AAAGATTTTCTTCAGATGTT | 58 | 61 | 932 |
| 1239399 | N/A | N/A | 10126 | 10145 | GTCTGGGACTTCCATAACCA | 84 | 56 | 933 |
| 1239421 | N/A | N/A | 10737 | 10756 | TTAACACACATTTCAAGTGT | 94 | 61 | 934 |
| 1239443 | N/A | N/A | 11090 | 11109 | CAGTACCATAACCTTTTTTT | 58 | 49 | 935 |
| 1239465 | N/A | N/A | 12640 | 12659 | GACGGAAATATCATTCGACT | 43 | 50 | 936 |
| 1239487 | N/A | N/A | 13667 | 13686 | GCTAAGAATACACTCAGAAA | 51 | 47 | 937 |
| 1239509 | N/A | N/A | 13924 | 13943 | AGAGACACCTGAACAGGCGA | 100 | 95 | 938 |
| 1239531 | N/A | N/A | 14215 | 14234 | AGCATAAGGAATAATCAAAC | 62 | 64 | 939 |
| 1239553 | N/A | N/A | 14386 | 14405 | ATTATGTTATTTCCTCTGTG | 40 | 46 | 940 |
| 1239575 | N/A | N/A | 14822 | 14841 | CATGACCATCTTATTCGGTG | 58 | 56 | 941 |
| 1239597 | N/A | N/A | 14985 | 15004 | TTATGTCAGCACCTTCTCCA | 62 | 50 | 942 |
| 1239619 | N/A | N/A | 15275 | 15294 | TTCTACTAACATTATTGAAA | 94 | 64 | 943 |
| 1239641 | N/A | N/A | 15368 | 15387 | AATTATTTTTCATCTCCTTC | 56 | 57 | 944 |
| 1239663 | N/A | N/A | 15421 | 15440 | AAACCCCTTACCTTTATCAC | 74 | 100 | 945 |
| 1239685 | N/A | N/A | 15522 | 15541 | TAATTCACCATATACCATGT | 74 | 53 | 946 |
| 1239707 | N/A | N/A | 15700 | 15719 | CCAAATCATCACTGTGTGCC | 48 | 35 | 947 |
| 1239729 | N/A | N/A | 15773 | 15792 | GAGCAGAGACCTATGACAAT | 75 | 70 | 948 |
| 1239751 | N/A | N/A | 15835 | 15854 | CATCAAATCAAAAATCTCTT | 90 | 82 | 949 |
| 1239773 | N/A | N/A | 15884 | 15903 | GATCAAACATCCAGAATGAC | 57 | 64 | 950 |
| 1239795 | N/A | N/A | 15951 | 15970 | TAGTTCATTATTTAACATTT | 67 | 55 | 951 |

TABLE 14
Reduction of PRNP RNA

| | SEQ ID | SEQ ID | SEQ ID | SEQ ID | | PRNP | PRNP | |
|---|---|---|---|---|---|---|---|---|
| | NO: 1 | NO: 1 | NO: 2 | NO: 2 | | (% UTC) | (% UTC) | SEQ |
| Compound | Start | Stop | Start | Stop | | RTS | RTS | ID |
| ID | Site | Site | Site | Site | Sequence (5′ to 3′) | 42354 | 42359 | NO |
| 1201142 | 1963 | 1982 | 17754 | 17773 | GCCACATATAGGGTCCTTTA | 8 | 17 | 66 |
| 1238124 | 55 | 74 | 3148 | 3167 | TAAAAATCATCTTTAATTGG | 91 | 92 | 952 |
| 1238146 | 122 | 141 | 3215 | 3234 | CTTGAACACTTGCATCAGTT | 89 | 74 | 953 |
| 1238168 | 510 | 529 | 16301 | 16320 | CAGTGTTCCATCCTCCAGGC | 6* | 58 | 954 |
| 1238190 | 595 | 614 | 16386 | 16405 | CCATGAGGCTGCCCCCAGCC | 75 | 226 | 955 |
| | 619 | 638 | 16410 | 16429 | | | | |
| 1238212 | 931 | 950 | 16722 | 16741 | TTGTTCTGGTTGCTGTACTC | 54 | 44 | 956 |
| 1238234 | 1267 | 1286 | 17058 | 17077 | GAGTGAGACACCACCACTAA | 86 | 70 | 957 |
| 1238256 | 1442 | 1461 | 17233 | 17252 | CAGATTAACCAATGGTTATT | 37 | 60 | 958 |
| 1238278 | 1602 | 1621 | 17393 | 17412 | AAAATATCTCTAAATAGCTA | 88 | 66 | 959 |
| 1238300 | 1681 | 1700 | 17472 | 17491 | CTCTAGGATTTTTTTGAATA | 38 | 54 | 960 |
| 1238322 | 1813 | 1832 | 17604 | 17623 | GTGACAATATTTACTCTTGT | 3 | 8 | 961 |
| 1238344 | 1858 | 1877 | 17649 | 17668 | GTTATGTTCACTGTGAATAT | 14 | 16 | 962 |
| 1238366 | 1886 | 1905 | 17677 | 17696 | GTCCCAGAAGCCTTTCATAT | 28 | 31 | 963 |
| 1238388 | 1928 | 1947 | 17719 | 17738 | AGGTTGCCTCCAAGGGCACC | 92 | 83 | 964 |
| 1238410 | 2010 | 2029 | 17801 | 17820 | ATTTACTTTTCAGCTGCCTT | 10 | 21 | 965 |
| 1238432 | 2059 | 2078 | 17850 | 17869 | TTTCCAGGTAAATGGACAAA | 43 | 44 | 966 |
| 1238454 | 2098 | 2117 | 17889 | 17908 | TCACAACTGCAGCTCTCCTG | 24 | 32 | 967 |
| 1238476 | 2129 | 2148 | 17920 | 17939 | AATTACATCATCCTCTATGA | 87 | 83 | 968 |
| 1238498 | 2157 | 2176 | 17948 | 17967 | TCTTTTCTTTGCACACTGAC | 9 | 23 | 969 |
| 1238520 | 2211 | 2230 | 18002 | 18021 | ACCTAATTCTGGTTTTTGAC | 41 | 41 | 970 |
| 1238542 | 2252 | 2271 | 18043 | 18062 | ATTCTTTGATTCAAAAGCCA | 26 | 44 | 971 |
| 1238564 | 2277 | 2296 | 18068 | 18087 | AAGATATTTTTTAGATTGTC | 56 | 44 | 972 |
| 1238586 | 2307 | 2326 | 18098 | 18117 | AATCAATCATATTTCTGTCA | 39 | 36 | 973 |
| 1238608 | 2340 | 2359 | 18131 | 18150 | ATTAACATTAACAGAATTTC | 93 | 77 | 974 |
| 1238630 | 2382 | 2401 | 18173 | 18192 | TAGGTGACAATATCAAACAA | 34 | 48 | 975 |
| 1238652 | 2441 | 2460 | 18232 | 18251 | TAGAATACTCACAAAGTGCA | 51 | 43 | 976 |
| 1238674 | 2538 | 2557 | 18329 | 18348 | GTTAATGCATTAGACACTTC | 25 | 32 | 977 |
| 1238696 | 2635 | 2654 | 18426 | 18445 | CTTTGGATTCTTACATGAAA | 50 | 57 | 978 |
| 1238718 | 2744 | 2763 | 18535 | 18554 | ATATTAAACATTTACAATTT | 104 | 84 | 979 |
| 1238740 | N/A | N/A | 4749 | 4768 | ACCGTGATGCTCTCAGAACA | 37 | 42 | 980 |
| 1238762 | N/A | N/A | 4830 | 4849 | AAATCCTTAATCCTATTCTA | 86 | 85 | 981 |
| 1238784 | N/A | N/A | 4878 | 4897 | TATTTATCCAATTCCCTGTT | 63 | 59 | 982 |
| 1238806 | N/A | N/A | 4925 | 4944 | TCTTCTACAAATCTAAGAGC | 85 | 73 | 983 |
| 1238828 | N/A | N/A | 4977 | 4996 | CTCTGTGTTTGTGTAAGTAA | 50 | 59 | 984 |
| 1238850 | N/A | N/A | 5047 | 5066 | TACAAATCACATCCTACCCC | 93 | 62 | 985 |
| 1238872 | N/A | N/A | 5102 | 5121 | ATAATCTTAATATTTTCCTT | 73 | 100 | 986 |
| 1238894 | N/A | N/A | 5134 | 5153 | TAAATGACTCATCATTTTGC | 63 | 56 | 987 |
| 1238916 | N/A | N/A | 5198 | 5217 | TTTTGGTTATTTTAATAGAT | 74 | 95 | 988 |
| 1238938 | N/A | N/A | 5383 | 5402 | GCTATCATTTCCTCCATTCT | 32 | 34 | 989 |
| 1238960 | N/A | N/A | 5455 | 5474 | GATTGCTTAACAAAATGTTT | 68 | 81 | 990 |
| 1238982 | N/A | N/A | 5584 | 5603 | GTGTTCTAATTTTAGATCAT | 46 | 48 | 991 |
| 1239004 | N/A | N/A | 5661 | 5680 | ATAATGTTCATTTCAGTTAA | 72 | 57 | 992 |
| 1239026 | N/A | N/A | 5714 | 5733 | TCAGTTTTTCCCCACATATC | 23 | 26 | 993 |
| 1239048 | N/A | N/A | 5785 | 5804 | CTTTCAGATTTTTCACATAT | 51 | 44 | 994 |
| 1239070 | N/A | N/A | 5890 | 5909 | CTGTGAACTATTTTTTAAAC | 29 | 64 | 995 |
| 1239092 | N/A | N/A | 6194 | 6213 | TAGATTTGTGCCTCCAGGAA | 33 | 33 | 996 |
| 1239114 | N/A | N/A | 6347 | 6366 | TCACACAGATGCACCCGAGT | 61 | 73 | 997 |
| 1239136 | N/A | N/A | 6445 | 6464 | CTCCCTTACATAATTCAGCA | 56 | 68 | 998 |
| 1239158 | N/A | N/A | 6562 | 6581 | AGAATCTTTCACCTTGGTTT | 33 | 41 | 999 |
| 1239180 | N/A | N/A | 6745 | 6764 | GAATTGCTGCACACACTATT | 72 | 106 | 1000 |
| 1239202 | N/A | N/A | 6884 | 6903 | CTTCAACATTTATAATGCTT | 38 | 36 | 1001 |
| 1239224 | N/A | N/A | 7290 | 7309 | ACTTGAAGCTTAATTAGTTA | 63 | 88 | 1002 |
| 1239246 | N/A | N/A | 7865 | 7884 | GGAACAATTTAACTTTTTCC | 50 | 62 | 1003 |
| 1239268 | N/A | N/A | 8191 | 8210 | ACAACATTAATTATCCCCCC | 66 | 67 | 1004 |
| 1239290 | N/A | N/A | 8419 | 8438 | AGCATTGTACCTCAACACAA | 50 | 43 | 1005 |
| 1239312 | N/A | N/A | 8806 | 8825 | TCAAGTTTTTTTTCTAAGCA | 66 | 63 | 1006 |
| 1239334 | N/A | N/A | 9091 | 9110 | AGTAAACACAATTTCAGTCA | 30 | 57 | 1007 |
| 1239356 | N/A | N/A | 9425 | 9444 | CATCTAGGTATAATTTTTTT | 87 | 140 | 1008 |
| 1239378 | N/A | N/A | 9671 | 9690 | AGAAAAGATTTTCTTCAGAT | 73 | 60 | 1009 |
| 1239400 | N/A | N/A | 10197 | 10216 | TGAGACATATTTTACAGAAA | 55 | 43 | 1010 |
| 1239422 | N/A | N/A | 10738 | 10757 | CTTAACACACATTTCAAGTG | 56 | 80 | 1011 |
| 1239444 | N/A | N/A | 11106 | 11125 | TGTAATATAATATTTACAGT | 82 | 85 | 1012 |
| 1239466 | N/A | N/A | 12669 | 12688 | GAATTTGATTACATCCTCAA | 66 | 78 | 1013 |
| 1239488 | N/A | N/A | 13693 | 13712 | AATACCTGTTTATTACTAAG | 83 | 61 | 1014 |
| 1239510 | N/A | N/A | 13929 | 13948 | CTCTTAGAGACACCTGAACA | 89 | 73 | 1015 |
| 1239532 | N/A | N/A | 14228 | 14247 | ACACATGTTATAAAGCATAA | 58 | 70 | 1016 |
| 1239554 | N/A | N/A | 14391 | 14410 | GAGATATTATGTTATTTCCT | 27 | 26 | 1017 |
| 1239576 | N/A | N/A | 14834 | 14853 | CAATTTTTCCAACATGACCA | 56 | 47 | 1018 |
| 1239598 | N/A | N/A | 14993 | 15012 | AAGGGCTTTTATGTCAGCAC | 44 | 52 | 1019 |
| 1239620 | V/A | N/A | 15276 | 15295 | TTTCTACTAACATTATTGAA | 93 | 84 | 1020 |
| 1239642 | N/A | N/A | 15369 | 15388 | AAATTATTTTTCATCTCCTT | 50 | 70 | 1021 |
| 1239664 | N/A | N/A | 15424 | 15443 | CAGAAACCCCTTACCTTTAT | 63 | 69 | 1022 |
| 1239686 | N/A | N/A | 15524 | 15543 | TATAATTCACCATATACCAT | 62 | 84 | 1023 |
| 1239708 | N/A | N/A | 15701 | 15720 | TCCAAATCATCACTGTGTGC | 53 | 53 | 1024 |
| 1239730 | N/A | N/A | 15774 | 15793 | AGAGCAGAGACCTATGACAA | 87 | 77 | 1025 |
| 1239752 | N/A | N/A | 15836 | 15855 | TCATCAAATCAAAAATCTCT | 76 | 35 | 1026 |
| 1239774 | N/A | N/A | 15887 | 15906 | ACAGATCAAACATCCAGAAT | 59 | 49 | 1027 |
| 1239796 | N/A | N/A | 15955 | 15974 | CTTTTAGTTCATTATTTAAC | 73 | 64 | 1028 |

TABLE 15
Reduction of PRNP RNA

| | SEQ ID | SEQ ID | SEQ ID | SEQ ID | | PRNP | |
|---|---|---|---|---|---|---|---|
| | NO: 1 | NO: 1 | NO: 2 | NO: 2 | | (% UTC) | SEQ |
| Compound | Start | Stop | Start | Stop | | RTS | ID |
| ID | Site | Site | Site | Site | Sequence (5′ to 3′) | 42354 | NO |
| 1201142 | 1963 | 1982 | 17754 | 17773 | GCCACATATAGGGTCCTTTA | 13 | 66 |
| 1238125 | 57 | 76 | 3150 | 3169 | TGTAAAAATCATCTTTAATT | 104 | 1029 |
| 1238147 | 123 | 142 | 3216 | 3235 | GCTTGAACACTTGCATCAGT | 59 | 1030 |
| 1238169 | 512 | 531 | 16303 | 16322 | CCCAGTGTTCCATCCTCCAG | 9* | 1031 |
| 1238191 | 596 | 615 | 16387 | 16406 | ACCATGAGGCTGCCCCCAGC | 48 | 1032 |
| | 620 | 639 | 16411 | 16430 | | | |
| 1238213 | 966 | 985 | 16757 | 16776 | GCTTGATTGTGATATTGACG | 52 | 1033 |
| 1238235 | 1269 | 1288 | 17060 | 17079 | AAGAGTGAGACACCACCACT | 62 | 1034 |
| 1238257 | 1444 | 1463 | 17235 | 17254 | TCCAGATTAACCAATGGTTA | 41 | 1035 |
| 1238279 | 1605 | 1624 | 17396 | 17415 | TGGAAAATATCTCTAAATAG | 78 | 1036 |
| 1238301 | 1691 | 1710 | 17482 | 17501 | AGCTAAGAATCTCTAGGATT | 31 | 1037 |
| 1238323 | 1814 | 1833 | 17605 | 17624 | TGTGACAATATTTACTCTTG | 10 | 1038 |
| 1238345 | 1859 | 1878 | 17650 | 17669 | AGTTATGTTCACTGTGAATA | 17 | 1039 |
| 1238367 | 1893 | 1912 | 17684 | 17703 | ATTTCAAGTCCCAGAAGCCT | 34 | 1040 |
| 1238389 | 1929 | 1948 | 17720 | 17739 | GAGGTTGCCTCCAAGGGCAC | 83 | 1041 |
| 1238411 | 2012 | 2031 | 17803 | 17822 | CAATTTACTTTTCAGCTGCC | 32 | 1042 |
| 1238433 | 2060 | 2079 | 17851 | 17870 | GTTTCCAGGTAAATGGACAA | 77 | 1043 |
| 1238455 | 2101 | 2120 | 17892 | 17911 | CTTTCACAACTGCAGCTCTC | 30 | 1044 |
| 1238477 | 2131 | 2150 | 17922 | 17941 | TTAATTACATCATCCTCTAT | 93 | 1045 |
| 1238499 | 2158 | 2177 | 17949 | 17968 | TTCTTTTCTTTGCACACTGA | 15 | 1046 |
| 1238521 | 2212 | 2231 | 18003 | 18022 | GACCTAATTCTGGTTTTTGA | 56 | 1047 |
| 1238543 | 2253 | 2272 | 18044 | 18063 | TATTCTTTGATTCAAAAGCC | 50 | 1048 |
| 1238565 | 2279 | 2298 | 18070 | 18089 | CTAAGATATTTTTTAGATTG | 78 | 1049 |
| 1238587 | 2308 | 2327 | 18099 | 18118 | AAATCAATCATATTTCTGTC | 51 | 1050 |
| 1238609 | 2342 | 2361 | 18133 | 18152 | TAATTAACATTAACAGAATT | 92 | 1051 |
| 1238631 | 2383 | 2402 | 18174 | 18193 | CTAGGTGACAATATCAAACA | 29 | 1052 |
| 1238653 | 2442 | 2461 | 18233 | 18252 | ATAGAATACTCACAAAGTGC | 41 | 1053 |
| 1238675 | 2539 | 2558 | 18330 | 18349 | AGTTAATGCATTAGACACTT | 24 | 1054 |
| 1238697 | 2636 | 2655 | 18427 | 18446 | ACTTTGGATTCTTACATGAA | 54 | 1055 |
| 1238719 | 2745 | 2764 | 18536 | 18555 | GATATTAAACATTTACAATT | 92 | 1056 |
| 1238741 | N/A | N/A | 4751 | 4770 | AAACCGTGATGCTCTCAGAA | 30 | 1057 |
| 1238763 | N/A | N/A | 4831 | 4850 | AAAATCCTTAATCCTATTCT | 102 | 1058 |
| 1238785 | N/A | N/A | 4879 | 4898 | ATATTTATCCAATTCCCTGT | 46 | 1059 |
| 1238807 | N/A | N/A | 4929 | 4948 | CCTTTCTTCTACAAATCTAA | 71 | 1060 |
| 1238829 | N/A | N/A | 4988 | 5007 | TGTAAGACCTTCTCTGTGTT | 66 | 1061 |
| 1238851 | N/A | N/A | 5049 | 5068 | CATACAAATCACATCCTACC | 80 | 1062 |
| 1238873 | N/A | N/A | 5103 | 5122 | TATAATCTTAATATTTTCCT | 110 | 1063 |
| 1238895 | N/A | N/A | 5136 | 5155 | TGTAAATGACTCATCATTTT | 58 | 1064 |
| 1238917 | N/A | N/A | 5209 | 5228 | ACTATTAATTATTTTGGTTA | 76 | 1065 |
| 1238939 | N/A | N/A | 5384 | 5403 | AGCTATCATTTCCTCCATTC | 31 | 1066 |
| 1238961 | N/A | N/A | 5456 | 5475 | AGATTGCTTAACAAAATGTT | 86 | 1067 |
| 1238983 | N/A | N/A | 5585 | 5604 | GGTGTTCTAATTTTAGATCA | 33 | 1068 |
| 1239005 | N/A | N/A | 5662 | 5681 | CATAATGTTCATTTCAGTTA | 45 | 1069 |
| 1239027 | N/A | N/A | 5716 | 5735 | TGTCAGTTTTTCCCCACATA | 16 | 1070 |
| 1239049 | N/A | N/A | 5786 | 5805 | CCTTTCAGATTTTTCACATA | 41 | 1071 |
| 1239071 | N/A | N/A | 5919 | 5938 | TGGGTCCATTTCATCTAAAA | 60 | 1072 |
| 1239093 | N/A | N/A | 6207 | 6226 | GGTTCAGCTAAACTAGATTT | 28 | 1073 |
| 1239115 | N/A | N/A | 6355 | 6374 | GGTGTCAGTCACACAGATGC | 81 | 1074 |
| 1239137 | N/A | N/A | 6447 | 6466 | TGCTCCCTTACATAATTCAG | 81 | 1075 |
| 1239159 | N/A | N/A | 6563 | 6582 | GAGAATCTTTCACCTTGGTT | 45 | 1076 |
| 1239181 | N/A | N/A | 6752 | 6771 | GCTGTGAGAATTGCTGCACA | 78 | 1077 |
| 1239203 | N/A | N/A | 6886 | 6905 | ATCTTCAACATTTATAATGC | 64 | 1078 |
| 1239225 | N/A | N/A | 7302 | 7321 | AAACACATTACAACTTGAAG | 58 | 1079 |
| 1239247 | N/A | N/A | 8024 | 8043 | TATTTCTTTCCTGATAGTTC | 32 | 1080 |
| 1239269 | N/A | N/A | 8192 | 8211 | AACAACATTAATTATCCCCC | 67 | 1081 |
| 1239291 | N/A | N/A | 8420 | 8439 | AAGCATTGTACCTCAACACA | 67 | 1082 |
| 1239313 | N/A | N/A | 8807 | 8826 | ATCAAGTTTTTTTTCTAAGC | 39 | 1083 |
| 1239335 | N/A | N/A | 9106 | 9125 | GCAAATAATCTACAAAGTAA | 93 | 1084 |
| 1239357 | N/A | N/A | 9434 | 9453 | CTATAAATTCATCTAGGTAT | 59 | 1085 |
| 1239379 | N/A | N/A | 9695 | 9714 | AGGAGCTCTATTAATAGGTT | 47 | 1086 |
| 1239401 | N/A | N/A | 10198 | 10217 | ATGAGACATATTTTACAGAA | 47 | 1087 |
| 1239423 | N/A | N/A | 10739 | 10758 | GCTTAACACACATTTCAAGT | 38 | 1088 |
| 1239445 | N/A | N/A | 11125 | 11144 | GCTGTCAAAAATTATACACT | 48 | 1089 |
| 1239467 | N/A | N/A | 12670 | 12689 | TGAATTTGATTACATCCTCA | 70 | 1090 |
| 1239489 | N/A | N/A | 13694 | 13713 | CAATACCTGTTTATTACTAA | 56 | 1091 |
| 1239511 | N/A | N/A | 13936 | 13955 | CTATGAGCTCTTAGAGACAC | 79 | 1092 |
| 1239533 | N/A | N/A | 14235 | 14254 | TGGGAAAACACATGTTATAA | 70 | 1093 |
| 1239555 | N/A | N/A | 14393 | 14412 | TTGAGATATTATGTTATTTC | 76 | 1094 |
| 1239577 | N/A | N/A | 14835 | 14854 | TCAATTTTTCCAACATGACC | 71 | 1095 |
| 1239599 | N/A | N/A | 14994 | 15013 | AAAGGGCTTTTATGTCAGCA | 25 | 1096 |
| 1239621 | N/A | N/A | 15283 | 15302 | GTTTATGTTTCTACTAACAT | 72 | 1097 |
| 1239643 | N/A | N/A | 15370 | 15389 | AAAATTATTTTTCATCTCCT | 79 | 1098 |
| 1239665 | N/A | N/A | 15425 | 15444 | TCAGAAACCCCTTACCTTTA | 87 | 1099 |
| 1239687 | N/A | N/A | 15525 | 15544 | ATATAATTCACCATATACCA | 69 | 1100 |
| 1239709 | N/A | N/A | 15703 | 15722 | GCTCCAAATCATCACTGTGT | 47 | 1101 |
| 1239731 | N/A | N/A | 15775 | 15794 | AAGAGCAGAGACCTATGACA | 98 | 1102 |
| 1239753 | N/A | N/A | 15837 | 15856 | TTCATCAAATCAAAAATCTC | 106 | 1103 |
| 1239775 | N/A | N/A | 15888 | 15907 | AACAGATCAAACATCCAGAA | 67 | 1104 |
| 1239797 | N/A | N/A | 15960 | 15979 | AATGACTTTTAGTTCATTAT | 91 | 1105 |

TABLE 16
Reduction of PRNP RNA

| | SEQ ID | SEQ ID | SEQ ID | SEQ ID | | | |
|---|---|---|---|---|---|---|---|
| | NO: 1 | NO: 1 | NO: 2 | NO: 2 | | PRNP | |
| Compound | Start | Stop | Start | Stop | | (% UTC) | SEQ |
| ID | Site | Site | Site | Site | Sequence (5′ to 3′) | RTS42354 | ID NO |
| 1201142 | 1963 | 1982 | 17754 | 17773 | GCCACATATAGGGTCCTTTA | 11 | 66 |
| 1238126 | 58 | 77 | 3151 | 3170 | CTGTAAAAATCATCTTTAAT | 119 | 1106 |
| 1238148 | 124 | 143 | 3217 | 3236 | CGCTTGAACACTTGCATCAG | 113 | 1107 |
| 1238170 | 513 | 532 | 16304 | 16323 | CCCCAGTGTTCCATCCTCCA | 7* | 1108 |
| 1238192 | 603 | 622 | 16394 | 16413 | AGCCACCACCATGAGGCTGC | 77 | 1109 |
| | 627 | 646 | 16418 | 16437 | | | |
| 1238214 | 1002 | 1021 | 16793 | 16812 | AGTTCTCCCCCTTGGTGGTT | 63 | 1110 |
| 1238236 | 1270 | 1289 | 17061 | 17080 | AAAGAGTGAGACACCACCAC | 67 | 1111 |
| 1238258 | 1451 | 1470 | 17242 | 17261 | AAATAAGTCCAGATTAACCA | 62 | 1112 |
| 1238280 | 1607 | 1626 | 17398 | 17417 | AATGGAAAATATCTCTAAAT | 95 | 1113 |
| 1238302 | 1692 | 1711 | 17483 | 17502 | GAGCTAAGAATCTCTAGGAT | 22 | 1114 |
| 1238324 | 1815 | 1834 | 17606 | 17625 | TTGTGACAATATTTACTCTT | 10 | 1115 |
| 1238346 | 1860 | 1879 | 17651 | 17670 | CAGTTATGTTCACTGTGAAT | 26 | 1116 |
| 1238368 | 1896 | 1915 | 17687 | 17706 | TTGATTTCAAGTCCCAGAAG | 26 | 1117 |
| 1238390 | 1933 | 1952 | 17724 | 17743 | ATGGGAGGTTGCCTCCAAGG | 108 | 1118 |
| 1238412 | 2013 | 2032 | 17804 | 17823 | GCAATTTACTTTTCAGCTGC | 40 | 1119 |
| 1238434 | 2062 | 2081 | 17853 | 17872 | TGGTTTCCAGGTAAATGGAC | 47 | 1120 |
| 1238456 | 2102 | 2121 | 17893 | 17912 | GCTTTCACAACTGCAGCTCT | 48 | 1121 |
| 1238478 | 2132 | 2151 | 17923 | 17942 | TTTAATTACATCATCCTCTA | 85 | 1122 |
| 1238500 | 2159 | 2178 | 17950 | 17969 | GTTCTTTTCTTTGCACACTG | 5 | 1123 |
| 1238522 | 2215 | 2234 | 18006 | 18025 | CTTGACCTAATTCTGGTTTT | 79 | 1124 |
| 1238544 | 2254 | 2273 | 18045 | 18064 | CTATTCTTTGATTCAAAAGC | 94 | 1125 |
| 1238566 | 2280 | 2299 | 18071 | 18090 | CCTAAGATATTTTTTAGATT | 87 | 1126 |
| 1238588 | 2310 | 2329 | 18101 | 18120 | TCAAATCAATCATATTTCTG | 88 | 1127 |
| 1238610 | 2346 | 2365 | 18137 | 18156 | ACTTTAATTAACATTAACAG | 105 | 1128 |
| 1238632 | 2384 | 2403 | 18175 | 18194 | GCTAGGTGACAATATCAAAC | 10 | 1129 |
| 1238654 | 2444 | 2463 | 18235 | 18254 | ACATAGAATACTCACAAAGT | 85 | 1130 |
| 1238676 | 2542 | 2561 | 18333 | 18352 | AAAAGTTAATGCATTAGACA | 90 | 1131 |
| 1238698 | 2647 | 2666 | 18438 | 18457 | TAATGGTGTCCACTTTGGAT | 40 | 1132 |
| 1238720 | 2746 | 2765 | 18537 | 18556 | AGATATTAAACATTTACAAT | 104 | 1133 |
| 1238742 | N/A | N/A | 4762 | 4781 | AACTGCTAATTAAACCGTGA | 35 | 1134 |
| 1238764 | N/A | N/A | 4832 | 4851 | AAAAATCCTTAATCCTATTC | 99 | 1135 |
| 1238786 | N/A | N/A | 4880 | 4899 | CATATTTATCCAATTCCCTG | 86 | 1136 |
| 1238808 | N/A | N/A | 4931 | 4950 | TTCCTTTCTTCTACAAATCT | 84 | 1137 |
| 1238830 | N/A | N/A | 4989 | 5008 | CTGTAAGACCTTCTCTGTGT | 52 | 1138 |
| 1238852 | N/A | N/A | 5050 | 5069 | ACATACAAATCACATCCTAC | 87 | 1139 |
| 1238874 | N/A | N/A | 5104 | 5123 | TTATAATCTTAATATTTTCC | 91 | 1140 |
| 1238896 | N/A | N/A | 5137 | 5156 | GTGTAAATGACTCATCATTT | 11 | 1141 |
| 1238918 | N/A | N/A | 5210 | 5229 | TACTATTAATTATTTTGGTT | 119 | 1142 |
| 1238940 | N/A | N/A | 5385 | 5404 | TAGCTATCATTTCCTCCATT | 43 | 1143 |
| 1238962 | N/A | N/A | 5457 | 5476 | CAGATTGCTTAACAAAATGT | 78 | 1144 |
| 1238984 | N/A | N/A | 5586 | 5605 | AGGTGTTCTAATTTTAGATC | 22 | 1145 |
| 1239006 | N/A | N/A | 5663 | 5682 | ACATAATGTTCATTTCAGTT | 20 | 1146 |
| 1239028 | N/A | N/A | 5717 | 5736 | TTGTCAGTTTTTCCCCACAT | 15 | 1147 |
| 1239050 | N/A | N/A | 5788 | 5807 | TTCCTTTCAGATTTTTCACA | 62 | 1148 |
| 1239072 | N/A | N/A | 5922 | 5941 | CTGTGGGTCCATTTCATCTA | 29 | 1149 |
| 1239094 | N/A | N/A | 6227 | 6246 | GGATATGTACAATCTGTTGT | 33 | 1150 |
| 1239116 | N/A | N/A | 6372 | 6391 | AAATGATGATGCAATGAGGT | 35 | 1151 |
| 1239138 | N/A | N/A | 6453 | 6472 | AATGGCTGCTCCCTTACATA | 36 | 1152 |
| 1239160 | N/A | N/A | 6564 | 6583 | AGAGAATCTTTCACCTTGGT | 55 | 1153 |
| 1239182 | N/A | N/A | 6773 | 6792 | TCGACAAAAAAAATTCTCCT | 101 | 1154 |
| 1239204 | N/A | N/A | 6889 | 6908 | CTAATCTTCAACATTTATAA | 101 | 1155 |
| 1239226 | N/A | N/A | 7307 | 7326 | CCATAAAACACATTACAACT | 82 | 1156 |
| 1239248 | N/A | N/A | 8026 | 8045 | TTTATTTCTTTCCTGATAGT | 81 | 1157 |
| 1239270 | N/A | N/A | 8193 | 8212 | TAACAACATTAATTATCCCC | 61 | 1158 |
| 1239292 | N/A | N/A | 8422 | 8441 | AGAAGCATTGTACCTCAACA | 42 | 1159 |
| 1239314 | N/A | N/A | 8808 | 8827 | TATCAAGTTTTTTTTCTAAG | 86 | 1160 |
| 1239336 | N/A | N/A | 9108 | 9127 | CAGCAAATAATCTACAAAGT | 83 | 1161 |
| 1239358 | N/A | N/A | 9435 | 9454 | TCTATAAATTCATCTAGGTA | 59 | 1162 |
| 1239380 | N/A | N/A | 9707 | 9726 | TGGTTGAAAATCAGGAGCTC | 42 | 1163 |
| 1239402 | N/A | N/A | 10338 | 10357 | GTCTACAAAACATTTTTTCT | 71 | 1164 |
| 1239424 | N/A | N/A | 10741 | 10760 | TAGCTTAACACACATTTCAA | 52 | 1165 |
| 1239446 | N/A | N/A | 11204 | 11223 | CAGCCAGTATGTGTCAGCTT | 67 | 1166 |
| 1239468 | N/A | N/A | 12672 | 12691 | GATGAATTTGATTACATCCT | 61 | 1167 |
| 1239490 | N/A | N/A | 13696 | 13715 | GTCAATACCTGTTTATTACT | 63 | 1168 |
| 1239512 | N/A | N/A | 13938 | 13957 | ATCTATGAGCTCTTAGAGAC | 76 | 1169 |
| 1239534 | N/A | N/A | 14238 | 14257 | GAATGGGAAAACACATGTTA | 63 | 1170 |
| 1239556 | N/A | N/A | 14394 | 14413 | CTTGAGATATTATGTTATTT | 79 | 1171 |
| 1239578 | N/A | N/A | 14836 | 14855 | CTCAATTTTTCCAACATGAC | 64 | 1172 |
| 1239600 | N/A | N/A | 14997 | 15016 | TCTAAAGGGCTTTTATGTCA | 80 | 1173 |
| 1239622 | N/A | N/A | 15284 | 15303 | TGTTTATGTTTCTACTAACA | 83 | 1174 |
| 1239644 | N/A | N/A | 15371 | 15390 | GAAAATTATTTTTCATCTCC | 104 | 1175 |
| 1239666 | N/A | N/A | 15426 | 15445 | CTCAGAAACCCCTTACCTTT | 68 | 1176 |
| 1239688 | N/A | N/A | 15526 | 15545 | CATATAATTCACCATATACC | 66 | 1177 |
| 1239710 | N/A | N/A | 15704 | 15723 | GGCTCCAAATCATCACTGTG | 71 | 1178 |
| 1239732 | N/A | N/A | 15786 | 15805 | CACTTAGCTCCAAGAGCAGA | 94 | 1179 |
| 1239754 | N/A | N/A | 15839 | 15858 | CATTCATCAAATCAAAAATC | 89 | 1180 |
| 1239776 | N/A | N/A | 15889 | 15908 | AAACAGATCAAACATCCAGA | 52 | 1181 |
| 1239798 | N/A | N/A | 15961 | 15980 | GAATGACTTTTAGTTCATTA | 89 | 1182 |

TABLE 17
Reduction of PRNP RNA

| | SEQ ID | SEQ ID | SEQ ID | SEQ ID | | | |
|---|---|---|---|---|---|---|---|
| | NO: 1 | NO: 1 | NO: 2 | NO: 2 | | PRNP | |
| Compound | Start | Stop | Start | Stop | | (% UTC) | SEQ |
| ID | Site | Site | Site | Site | Sequence (5′ to 3′) | RTS42354 | ID NO |
| 1201142 | 1963 | 1982 | 17754 | 17773 | GCCACATATAGGGTCCTTTA | 8 | 66 |
| 1238127 | 59 | 78 | 3152 | 3171 | ACTGTAAAAATCATCTTTAA | 92 | 1183 |
| 1238149 | 125 | 144 | 3218 | 3237 | TCGCTTGAACACTTGCATCA | 82 | 1184 |
| 1238171 | 521 | 540 | 16312 | 16331 | TCGGCTGCCCCCAGTGTTCC | 43* | 1185 |
| 1238193 | 604 | 623 | 16395 | 16414 | CAGCCACCACCATGAGGCTG | 82 | 1186 |
| | 628 | 647 | 16419 | 16438 | | | |
| | 676 | 695 | 16467 | 16486 | | | |
| 1238215 | 1005 | 1024 | 16796 | 16815 | TGAAGTTCTCCCCCTTGGTG | 78 | 1187 |
| 1238237 | 1300 | 1319 | 17091 | 17110 | TGATTAGCCTATCCGGGACA | 55 | 1188 |
| 1238259 | 1457 | 1476 | 17248 | 17267 | GTCCAAAAATAAGTCCAGAT | 4 | 1189 |
| 1238281 | 1611 | 1630 | 17402 | 17421 | TTAAAATGGAAAATATCTCT | 96 | 1190 |
| 1238303 | 1693 | 1712 | 17484 | 17503 | AGAGCTAAGAATCTCTAGGA | 40 | 1191 |
| 1238325 | 1816 | 1835 | 17607 | 17626 | GTTGTGACAATATTTACTCT | 5 | 1192 |
| 1238347 | 1862 | 1881 | 17653 | 17672 | TACAGTTATGTTCACTGTGA | 80 | 1193 |
| 1238369 | 1897 | 1916 | 17688 | 17707 | TTTGATTTCAAGTCCCAGAA | 10 | 1194 |
| 1238391 | 1947 | 1966 | 17738 | 17757 | TTTAAACATCTAAAATGGGA | 87 | 1195 |
| 1238413 | 2014 | 2033 | 17805 | 17824 | GGCAATTTACTTTTCAGCTG | 42 | 1196 |
| 1238435 | 2068 | 2087 | 17859 | 17878 | TCATTCTGGTTTCCAGGTAA | 16 | 1197 |
| 1238457 | 2103 | 2122 | 17894 | 17913 | TGCTTTCACAACTGCAGCTC | 75 | 1198 |
| 1238479 | 2133 | 2152 | 17924 | 17943 | TTTTAATTACATCATCCTCT | 100 | 1199 |
| 1238501 | 2160 | 2179 | 17951 | 17970 | AGTTCTTTTCTTTGCACACT | 6 | 1200 |
| 1238523 | 2216 | 2235 | 18007 | 18026 | ACTTGACCTAATTCTGGTTT | 30 | 1201 |
| 1238545 | 2255 | 2274 | 18046 | 18065 | CCTATTCTTTGATTCAAAAG | 71 | 1202 |
| 1238567 | 2281 | 2300 | 18072 | 18091 | ACCTAAGATATTTTTTAGAT | 127 | 1203 |
| 1238589 | 2311 | 2330 | 18102 | 18121 | TTCAAATCAATCATATTTCT | 79 | 1204 |
| 1238611 | 2347 | 2366 | 18138 | 18157 | TACTTTAATTAACATTAACA | 94 | 1205 |
| 1238633 | 2385 | 2404 | 18176 | 18195 | TGCTAGGTGACAATATCAAA | 22 | 1206 |
| 1238655 | 2446 | 2465 | 18237 | 18256 | TTACATAGAATACTCACAAA | 67 | 1207 |
| 1238677 | 2547 | 2566 | 18338 | 18357 | CTTACAAAAGTTAATGCATT | 73 | 1208 |
| 1238699 | 2669 | 2688 | 18460 | 18479 | CATGCATATTTCAAAGACCT | 41 | 1209 |
| 1238721 | 2747 | 2766 | 18538 | 18557 | CAGATATTAAACATTTACAA | 98 | 1210 |
| 1238743 | N/A | N/A | 4763 | 4782 | GAACTGCTAATTAAACCGTG | 62 | 1211 |
| 1238765 | N/A | N/A | 4834 | 4853 | GTAAAAATCCTTAATCCTAT | 110 | 1212 |
| 1238787 | N/A | N/A | 4881 | 4900 | ACATATTTATCCAATTCCCT | 87 | 1213 |
| 1238809 | N/A | N/A | 4934 | 4953 | TTTTTCCTTTCTTCTACAAA | 88 | 1214 |
| 1238831 | N/A | N/A | 4990 | 5009 | ACTGTAAGACCTTCTCTGTG | 68 | 1215 |
| 1238853 | N/A | N/A | 5051 | 5070 | AACATACAAATCACATCCTA | 63 | 1216 |
| 1238875 | N/A | N/A | 5107 | 5126 | CTATTATAATCTTAATATTT | 102 | 1217 |
| 1238897 | N/A | N/A | 5139 | 5158 | TTGTGTAAATGACTCATCAT | 59 | 1218 |
| 1238919 | N/A | N/A | 5211 | 5230 | TTACTATTAATTATTTTGGT | 67 | 1219 |
| 1238941 | N/A | N/A | 5387 | 5406 | AGTAGCTATCATTTCCTCCA | 27 | 1220 |
| 1238963 | N/A | N/A | 5461 | 5480 | TCACCAGATTGCTTAACAAA | 73 | 1221 |
| 1238985 | N/A | N/A | 5587 | 5606 | CAGGTGTTCTAATTTTAGAT | 38 | 1222 |
| 1239007 | N/A | N/A | 5664 | 5683 | TACATAATGTTCATTTCAGT | 44 | 1223 |
| 1239029 | N/A | N/A | 5718 | 5737 | CTTGTCAGTTTTTCCCCACA | 18 | 1224 |
| 1239051 | N/A | N/A | 5792 | 5811 | GCTTTTCCTTTCAGATTTTT | 15 | 1225 |
| 1239073 | N/A | N/A | 5923 | 5942 | ACTGTGGGTCCATTTCATCT | 22 | 1226 |
| 1239095 | N/A | N/A | 6229 | 6248 | CAGGATATGTACAATCTGTT | 37 | 1227 |
| 1239117 | N/A | N/A | 6386 | 6405 | GCTGATTTTACAAGAAATGA | 46 | 1228 |
| 1239139 | N/A | N/A | 6472 | 6491 | TTGATTACATTATTTTTAAA | 94 | 1229 |
| 1239161 | N/A | N/A | 6567 | 6586 | TTCAGAGAATCTTTCACCTT | 53 | 1230 |
| 1239183 | N/A | N/A | 6785 | 6804 | ATGGTTAACACATCGACAAA | 80 | 1231 |
| 1239205 | N/A | N/A | 6892 | 6911 | GGTCTAATCTTCAACATTTA | 75 | 1232 |
| 1239227 | N/A | N/A | 7309 | 7328 | GCCCATAAAACACATTACAA | 61 | 1233 |
| 1239249 | N/A | N/A | 8029 | 8048 | CTTTTTATTTCTTTCCTGAT | 62 | 1234 |
| 1239271 | N/A | N/A | 8194 | 8213 | TTAACAACATTAATTATCCC | 112 | 1235 |
| 1239293 | N/A | N/A | 8425 | 8444 | TGTAGAAGCATTGTACCTCA | 16 | 1236 |
| 1239315 | N/A | N/A | 8809 | 8828 | GTATCAAGTTTTTTTTCTAA | 39 | 1237 |
| 1239337 | N/A | N/A | 9109 | 9128 | CCAGCAAATAATCTACAAAG | 86 | 1238 |
| 1239359 | N/A | N/A | 9438 | 9457 | TGTTCTATAAATTCATCTAG | 41 | 1239 |
| 1239381 | N/A | N/A | 9711 | 9730 | AGAATGGTTGAAAATCAGGA | 37 | 1240 |
| 1239403 | N/A | N/A | 10464 | 10483 | ATCATAGAATGTTTTTTCAA | 86 | 1241 |
| 1239425 | N/A | N/A | 10742 | 10761 | TTAGCTTAACACACATTTCA | 47 | 1242 |
| 1239447 | N/A | N/A | 11335 | 11354 | TTGTTGTTTCTTTTCTGGTA | 21 | 1243 |
| 1239469 | N/A | N/A | 12718 | 12737 | GGAAGAACTTTTTAAACAAA | 81 | 1244 |
| 1239491 | N/A | N/A | 13698 | 13717 | TGGTCAATACCTGTTTATTA | 43 | 1245 |
| 1239513 | N/A | N/A | 13974 | 13993 | TTGAATGTGCCTCATTTAAA | 98 | 1246 |
| 1239535 | N/A | N/A | 14239 | 14258 | TGAATGGGAAAACACATGTT | 82 | 1247 |
| 1239557 | N/A | N/A | 14395 | 14414 | ACTTGAGATATTATGTTATT | 71 | 1248 |
| 1239579 | N/A | N/A | 14839 | 14858 | CTTCTCAATTTTTCCAACAT | 84 | 1249 |
| 1239601 | N/A | N/A | 15011 | 15030 | TCAGTAGCTTTCAGTCTAAA | 67 | 1250 |
| 1239623 | N/A | N/A | 15285 | 15304 | CTGTTTATGTTTCTACTAAC | 55 | 1251 |
| 1239645 | N/A | N/A | 15373 | 15392 | TAGAAAATTATTTTTCATCT | 111 | 1252 |
| 1239667 | N/A | N/A | 15427 | 15446 | ACTCAGAAACCCCTTACCTT | 84 | 1253 |
| 1239689 | N/A | N/A | 15527 | 15546 | CCATATAATTCACCATATAC | 71 | 1254 |
| 1239711 | N/A | N/A | 15706 | 15725 | TAGGCTCCAAATCATCACTG | 40 | 1255 |
| 1239733 | N/A | N/A | 15791 | 15810 | CTGGGCACTTAGCTCCAAGA | 117 | 1256 |
| 1239755 | N/A | N/A | 15840 | 15859 | ACATTCATCAAATCAAAAAT | 116 | 1257 |
| 1239777 | N/A | N/A | 15890 | 15909 | CAAACAGATCAAACATCCAG | 96 | 1258 |
| 1239799 | N/A | N/A | 15962 | 15981 | TGAATGACTTTTAGTTCATT | 85 | 1259 |

TABLE 18
Reduction of PRNP RNA

| | SEQ ID | SEQ ID | SEQ ID | SEQ ID | | | |
|---|---|---|---|---|---|---|---|
| | NO: 1 | NO: 1 | NO: 2 | NO: 2 | | PRNP | |
| Compound | Start | Stop | Start | Stop | | (% UTC) | SEQ |
| ID | Sit | Site | Site | Site | Sequence (5′ to 3′) | RTS42354 | ID NO |
| 1201142 | 1963 | 1982 | 17754 | 17773 | GCCACATATAGGGTCCTTTA | 9 | 66 |
| 1238128 | 60 | 79 | 3153 | 3172 | GACTGTAAAAATCATCTTTA | 79 | 1260 |
| 1238150 | 127 | 146 | 3220 | 3239 | ATTCGCTTGAACACTTGCAT | 84 | 1261 |
| 1238172 | 584 | 603 | 16375 | 16394 | CCCCCAGCCACCACCGCCCT | 79 | 1262 |
| 1238194 | 659 | 678 | 16450 | 16469 | CTGTCCCCAGCCACCACCAT | 51 | 1263 |
| 1238216 | 1036 | 1055 | 16827 | 16846 | ACGCGCTCCATCATCTTAAC | 67 | 1264 |
| 1238238 | 1301 | 1320 | 17092 | 17111 | TTGATTAGCCTATCCGGGAC | 77 | 1265 |
| 1238260 | 1460 | 1479 | 17251 | 17270 | TAAGTCCAAAAATAAGTCCA | 57 | 1266 |
| 1238282 | 1612 | 1631 | 17403 | 17422 | CTTAAAATGGAAAATATCTC | 99 | 1267 |
| 1238304 | 1753 | 1772 | 17544 | 17563 | ATCACCCCAGTTCTCGGTAC | 88 | 1268 |
| 1238326 | 1817 | 1836 | 17608 | 17627 | TGTTGTGACAATATTTACTC | 36 | 1269 |
| 1238348 | 1863 | 1882 | 17654 | 17673 | TTACAGTTATGTTCACTGTG | 70 | 1270 |
| 1238370 | 1898 | 1917 | 17689 | 17708 | ATTTGATTTCAAGTCCCAGA | 3 | 1271 |
| 1238392 | 1951 | 1970 | 17742 | 17761 | GTCCTTTAAACATCTAAAAT | 76 | 1272 |
| 1238414 | 2015 | 2034 | 17806 | 17825 | AGGCAATTTACTTTTCAGCT | 35 | 1273 |
| 1238436 | 2069 | 2088 | 17860 | 17879 | ATCATTCTGGTTTCCAGGTA | 15 | 1274 |
| 1238458 | 2104 | 2123 | 17895 | 17914 | GTGCTTTCACAACTGCAGCT | 40 | 1275 |
| 1238480 | 2134 | 2153 | 17925 | 17944 | TTTTTAATTACATCATCCTC | 93 | 1276 |
| 1238502 | 2161 | 2180 | 17952 | 17971 | CAGTTCTTTTCTTTGCACAC | 13 | 1277 |
| 1238524 | 2217 | 2236 | 18008 | 18027 | AACTTGACCTAATTCTGGTT | 80 | 1278 |
| 1238546 | 2256 | 2275 | 18047 | 18066 | CCCTATTCTTTGATTCAAAA | 45 | 1279 |
| 1238568 | 2287 | 2306 | 18078 | 18097 | TCTCCAACCTAAGATATTTT | 62 | 1280 |
| 1238590 | 2312 | 2331 | 18103 | 18122 | CTTCAAATCAATCATATTTC | 68 | 1281 |
| 1238612 | 2348 | 2367 | 18139 | 18158 | TTACTTTAATTAACATTAAC | 76 | 1282 |
| 1238634 | 2386 | 2405 | 18177 | 18196 | CTGCTAGGTGACAATATCAA | 30 | 1283 |
| 1238656 | 2448 | 2467 | 18239 | 18258 | TTTTACATAGAATACTCACA | 51 | 1284 |
| 1238678 | 2550 | 2569 | 18341 | 18360 | TACCTTACAAAAGTTAATGC | 59 | 1285 |
| 1238700 | 2670 | 2689 | 18461 | 18480 | ACATGCATATTTCAAAGACC | 37 | 1286 |
| 1238722 | 2748 | 2767 | 18539 | 18558 | TCAGATATTAAACATTTACA | 76 | 1287 |
| 1238744 | N/A | N/A | 4784 | 4803 | AAACACTTCAAATCATATGG | 84 | 1288 |
| 1238766 | N/A | N/A | 4835 | 4854 | TGTAAAAATCCTTAATCCTA | 77 | 1289 |
| 1238788 | N/A | N/A | 4882 | 4901 | AACATATTTATCCAATTCCC | 73 | 1290 |
| 1238810 | N/A | N/A | 4937 | 4956 | GATTTTTTCCTTTCTTCTAC | 52 | 1291 |
| 1238832 | N/A | N/A | 4993 | 5012 | TTCACTGTAAGACCTTCTCT | 40 | 1292 |
| 1238854 | N/A | N/A | 5052 | 5071 | TAACATACAAATCACATCCT | 85 | 1293 |
| 1238876 | N/A | N/A | 5108 | 5127 | TCTATTATAATCTTAATATT | 104 | 1294 |
| 1238898 | N/A | N/A | 5144 | 5163 | TTTTATTGTGTAAATGACTC | 66 | 1295 |
| 1238920 | N/A | N/A | 5215 | 5234 | GCTGTTACTATTAATTATTT | 54 | 1296 |
| 1238942 | N/A | N/A | 5388 | 5407 | AAGTAGCTATCATTTCCTCC | 44 | 1297 |
| 1238964 | N/A | N/A | 5462 | 5481 | ATCACCAGATTGCTTAACAA | 69 | 1298 |
| 1238986 | N/A | N/A | 5591 | 5610 | TTTCCAGGTGTTCTAATTTT | 57 | 1299 |
| 1239008 | N/A | N/A | 5666 | 5685 | GTTACATAATGTTCATTTCA | 19 | 1300 |
| 1239030 | N/A | N/A | 5719 | 5738 | ACTTGTCAGTTTTTCCCCAC | 20 | 1301 |
| 1239052 | N/A | N/A | 5795 | 5814 | TGTGCTTTTCCTTTCAGATT | 8 | 1302 |
| 1239074 | N/A | N/A | 5940 | 5959 | CCTTTCTCTTACAGAAAACT | 88 | 1303 |
| 1239096 | N/A | N/A | 6261 | 6280 | CTTTCAACCTTCCTAAGACC | 98 | 1304 |
| 1239118 | N/A | N/A | 6388 | 6407 | AAGCTGATTTTACAAGAAAT | 61 | 1305 |
| 1239140 | N/A | N/A | 6474 | 6493 | ATTTGATTACATTATTTTTA | 96 | 1306 |
| 1239162 | N/A | N/A | 6568 | 6587 | GTTCAGAGAATCTTTCACCT | 14 | 1307 |
| 1239184 | N/A | N/A | 6786 | 6805 | AATGGTTAACACATCGACAA | 49 | 1308 |
| 1239206 | N/A | N/A | 6917 | 6936 | CAGGCTTCAGTGCTAGGTCC | 85 | 1309 |
| 1239228 | N/A | N/A | 7340 | 7359 | GAGATCCAAATATAGGCACT | 19 | 1310 |
| 1239250 | N/A | N/A | 8038 | 8057 | TGGCACTTTCTTTTTATTTC | 12 | 1311 |
| 1239272 | N/A | N/A | 8235 | 8254 | TTCTATGGAATCTGTAGGTC | 14 | 1312 |
| 1239294 | N/A | N/A | 8519 | 8538 | GAGACAATAACCATACGATC | 38 | 1313 |
| 1239316 | N/A | N/A | 8884 | 8903 | CATGGAGCATGCTCCAAGAC | 86 | 1314 |
| 1239338 | N/A | N/A | 9113 | 9132 | GTCACCAGCAAATAATCTAC | 56 | 1315 |
| 1239360 | N/A | N/A | 9439 | 9458 | TTGTTCTATAAATTCATCTA | 58 | 1316 |
| 1239382 | N/A | N/A | 9755 | 9774 | AAGAAGAATACATTATGACC | 77 | 1317 |
| 1239404 | N/A | N/A | 10466 | 10485 | ACATCATAGAATGTTTTTTC | 49 | 1318 |
| 1239426 | N/A | N/A | 10743 | 10762 | ATTAGCTTAACACACATTTC | 56 | 1319 |
| 1239448 | N/A | N/A | 11336 | 11355 | GTTGTTGTTTCTTTTCTGGT | 5 | 1320 |
| 1239470 | N/A | N/A | 13314 | 13333 | GGTGACACATTATACAGAGA | 43 | 1321 |
| 1239492 | N/A | N/A | 13699 | 13718 | ATGGTCAATACCTGTTTATT | 53 | 1322 |
| 1239514 | N/A | N/A | 14090 | 14109 | AAACATTTATTTCATGTGCC | 51 | 1323 |
| 1239536 | N/A | N/A | 14240 | 14259 | ATGAATGGGAAAACACATGT | 118 | 1324 |
| 1239558 | N/A | N/A | 14397 | 14416 | CTACTTGAGATATTATGTTA | 80 | 1325 |
| 1239580 | N/A | N/A | 14841 | 14860 | AGCTTCTCAATTTTTCCAAC | 48 | 1326 |
| 1239602 | N/A | N/A | 15013 | 15032 | AGTCAGTAGCTTTCAGTCTA | 39 | 1327 |
| 1239624 | N/A | N/A | 15287 | 15306 | TCCTGTTTATGTTTCTACTA | 62 | 1328 |
| 1239646 | N/A | N/A | 15392 | 15411 | TGCAAATTTTTCTAAAAATT | 100 | 1329 |
| 1239668 | N/A | N/A | 15429 | 15448 | GAACTCAGAAACCCCTTACC | 58 | 1330 |
| 1239690 | N/A | N/A | 15528 | 15547 | ACCATATAATTCACCATATA | 48 | 1331 |
| 1239712 | N/A | N/A | 15708 | 15727 | CATAGGCTCCAAATCATCAC | 77 | 1332 |
| 1239734 | N/A | N/A | 15802 | 15821 | TCTCATTTACCCTGGGCACT | 53 | 1333 |
| 1239756 | N/A | N/A | 15842 | 15861 | GTACATTCATCAAATCAAAA | 51 | 1334 |
| 1239778 | N/A | N/A | 15891 | 15910 | ACAAACAGATCAAACATCCA | 86 | 1335 |
| 1239800 | N/A | N/A | 15964 | 15983 | GATGAATGACTTTTAGTTCA | 65 | 1336 |

TABLE 19
Reduction of PRNP RNA

| | SEQ ID | SEQ ID | SEQ ID | SEQ ID | | | |
|---|---|---|---|---|---|---|---|
| | NO: 1 | NO: 1 | NO: 2 | NO: 2 | | PRNP | |
| Compound | Start | Stop | Start | Stop | | (% UTC) | SEQ |
| ID | Site | Site | Site | Site | Sequence (5′ to 3′) | RTS42354 | ID NO |
| 1201142 | 1963 | 1982 | 17754 | 17773 | GCCACATATAGGGTCCTTTA | 10 | 66 |
| 1238129 | 61 | 80 | 3154 | 3173 | TGACTGTAAAAATCATCTTT | 89 | 1337 |
| 1238151 | 129 | 148 | 3222 | 3241 | AGATTCGCTTGAACACTTGC | 87 | 1338 |
| 1238173 | 585 | 604 | 16376 | 16395 | GCCCCCAGCCACCACCGCCC | 83 | 1339 |
| 1238195 | 605 | 624 | 16396 | 16415 | CCAGCCACCACCATGAGGCT | 82 | 1340 |
| | 629 | 648 | 16420 | 16439 | | | |
| | 677 | 696 | 16468 | 16487 | | | |
| 1238217 | 1037 | 1056 | 16828 | 16847 | CACGCGCTCCATCATCTTAA | 50 | 1341 |
| 1238239 | 1302 | 1321 | 17093 | 17112 | ATTGATTAGCCTATCCGGGA | 52 | 1342 |
| 1238261 | 1462 | 1481 | 17253 | 17272 | ACTAAGTCCAAAAATAAGTC | 72 | 1343 |
| 1238283 | 1617 | 1636 | 17408 | 17427 | GTTTTCTTAAAATGGAAAAT | 83 | 1344 |
| 1238305 | 1761 | 1780 | 17552 | 17571 | AGTAAAACATCACCCCAGTT | 42 | 1345 |
| 1238327 | 1818 | 1837 | 17609 | 17628 | GTGTTGTGACAATATTTACT | 6 | 1346 |
| 1238349 | 1864 | 1883 | 17655 | 17674 | GTTACAGTTATGTTCACTGT | 60 | 1347 |
| 1238371 | 1899 | 1918 | 17690 | 17709 | CATTTGATTTCAAGTCCCAG | 9 | 1348 |
| 1238393 | 1952 | 1971 | 17743 | 17762 | GGTCCTTTAAACATCTAAAA | 52 | 1349 |
| 1238415 | 2016 | 2035 | 17807 | 17826 | AAGGCAATTTACTTTTCAGC | 62 | 1350 |
| 1238437 | 2070 | 2089 | 17861 | 17880 | AATCATTCTGGTTTCCAGGT | 8 | 1351 |
| 1238459 | 2106 | 2125 | 17897 | 17916 | TGGTGCTTTCACAACTGCAG | 33 | 1352 |
| 1238481 | 2135 | 2154 | 17926 | 17945 | TTTTTTAATTACATCATCCT | 94 | 1353 |
| 1238503 | 2162 | 2181 | 17953 | 17972 | GCAGTTCTTTTCTTTGCACA | 46 | 1354 |
| 1238525 | 2218 | 2237 | 18009 | 18028 | GAACTTGACCTAATTCTGGT | 22 | 1355 |
| 1238547 | 2257 | 2276 | 18048 | 18067 | TCCCTATTCTTTGATTCAAA | 52 | 1356 |
| 1238569 | 2289 | 2308 | 18080 | 18099 | CATCTCCAACCTAAGATATT | 84 | 1357 |
| 1238591 | 2313 | 2332 | 18104 | 18123 | ACTTCAAATCAATCATATTT | 93 | 1358 |
| 1238613 | 2350 | 2369 | 18141 | 18160 | TTTTACTTTAATTAACATTA | 72 | 1359 |
| 1238635 | 2392 | 2411 | 18183 | 18202 | ACATATCTGCTAGGTGACAA | 21 | 1360 |
| 1238657 | 2480 | 2499 | 18271 | 18290 | CTATGCAATATATATTTTAT | 114 | 1361 |
| 1238679 | 2553 | 2572 | 18344 | 18363 | CAGTACCTTACAAAAGTTAA | 36 | 1362 |
| 1238701 | 2671 | 2690 | 18462 | 18481 | TACATGCATATTTCAAAGAC | 58 | 1363 |
| 1238723 | 2749 | 2768 | 18540 | 18559 | GTCAGATATTAAACATTTAC | 56 | 1364 |
| 1238745 | N/A | N/A | 4787 | 4806 | GGGAAACACTTCAAATCATA | 51 | 1365 |
| 1238767 | N/A | N/A | 4836 | 4855 | TTGTAAAAATCCTTAATCCT | 70 | 1366 |
| 1238789 | N/A | N/A | 4883 | 4902 | TAACATATTTATCCAATTCC | 64 | 1367 |
| 1238811 | N/A | N/A | 4939 | 4958 | GTGATTTTTTCCTTTCTTCT | 22 | 1368 |
| 1238833 | N/A | N/A | 4999 | 5018 | CTTTTTTTCACTGTAAGACC | 40 | 1369 |
| 1238855 | N/A | N/A | 5053 | 5072 | ATAACATACAAATCACATCC | 83 | 1370 |
| 1238877 | N/A | N/A | 5109 | 5128 | ATCTATTATAATCTTAATAT | 100 | 1371 |
| 1238899 | N/A | N/A | 5151 | 5170 | ATTTGCATTTTATTGTGTAA | 66 | 1372 |
| 1238921 | N/A | N/A | 5216 | 5235 | TGCTGTTACTATTAATTATT | 72 | 1373 |
| 1238943 | N/A | N/A | 5389 | 5408 | AAAGTAGCTATCATTTCCTC | 61 | 1374 |
| 1238965 | N/A | N/A | 5471 | 5490 | TCTTAATGCATCACCAGATT | 53 | 1375 |
| 1238987 | N/A | N/A | 5599 | 5618 | TAGGCTCTTTTCCAGGTGTT | 9 | 1376 |
| 1239009 | N/A | N/A | 5667 | 5686 | GGTTACATAATGTTCATTTC | 4 | 1377 |
| 1239031 | N/A | N/A | 5720 | 5739 | TACTTGTCAGTTTTTCCCCA | 17 | 1378 |
| 1239053 | N/A | N/A | 5797 | 5816 | TCTGTGCTTTTCCTTTCAGA | 45 | 1379 |
| 1239075 | N/A | N/A | 5950 | 5969 | AACAATCTCTCCTTTCTCTT | 56 | 1380 |
| 1239097 | N/A | N/A | 6262 | 6281 | ACTTTCAACCTTCCTAAGAC | 94 | 1381 |
| 1239119 | N/A | N/A | 6389 | 6408 | TAAGCTGATTTTACAAGAAA | 70 | 1382 |
| 1239141 | N/A | N/A | 6477 | 6496 | GTTATTTGATTACATTATTT | 50 | 1383 |
| 1239163 | N/A | N/A | 6569 | 6588 | AGTTCAGAGAATCTTTCACC | 35 | 1384 |
| 1239185 | N/A | N/A | 6787 | 6806 | GAATGGTTAACACATCGACA | 27 | 1385 |
| 1239207 | N/A | N/A | 6924 | 6943 | CCGTGATCAGGCTTCAGTGC | 36 | 1386 |
| 1239229 | N/A | N/A | 7341 | 7360 | TGAGATCCAAATATAGGCAC | 59 | 1387 |
| 1239251 | N/A | N/A | 8040 | 8059 | AATGGCACTTTCTTTTTATT | 27 | 1388 |
| 1239273 | N/A | N/A | 8242 | 8261 | ATAGGGATTCTATGGAATCT | 57 | 1389 |
| 1239295 | N/A | N/A | 8526 | 8545 | ACAGAGTGAGACAATAACCA | 42 | 1390 |
| 1239317 | N/A | N/A | 8937 | 8956 | AATACAGGACATTCCATCCA | 78 | 1391 |
| 1239339 | N/A | N/A | 9211 | 9230 | GCAAGCTACAAAATTTTACT | 34 | 1392 |
| 1239361 | N/A | N/A | 9458 | 9477 | TTGCTTTTATGCTATTAGGT | 23 | 1393 |
| 1239383 | N/A | N/A | 9779 | 9798 | CAACTTATTTTAACAGTTTA | 77 | 1394 |
| 1239405 | N/A | N/A | 10474 | 10493 | GGACAGTAACATCATAGAAT | 20 | 1395 |
| 1239427 | N/A | N/A | 10744 | 10763 | GATTAGCTTAACACACATTT | 36 | 1396 |
| 1239449 | N/A | N/A | 11437 | 11456 | GGATTGTCTTTCTATTAAGA | 16 | 1397 |
| 1239471 | N/A | N/A | 13385 | 13404 | CAGATATTCAAAGTAACAAC | 50 | 1398 |
| 1239493 | N/A | N/A | 13701 | 13720 | TAATGGTCAATACCTGTTTA | 66 | 1399 |
| 1239515 | N/A | N/A | 14112 | 14131 | AACATTTTCAATTCAGTTAA | 77 | 1400 |
| 1239537 | N/A | N/A | 14281 | 14300 | GCTTGACCCATAGACATGCA | 67 | 1401 |
| 1239559 | N/A | N/A | 14424 | 14443 | CTTCATTATTCTCTGGAGCA | 26 | 1402 |
| 1239581 | N/A | N/A | 14851 | 14870 | TAAGCACCTCAGCTTCTCAA | 92 | 1403 |
| 1239603 | N/A | N/A | 15014 | 15033 | CAGTCAGTAGCTTTCAGTCT | 32 | 1404 |
| 1239625 | N/A | N/A | 15288 | 15307 | ATCCTGTTTATGTTTCTACT | 36 | 1405 |
| 1239647 | N/A | N/A | 15393 | 15412 | CTGCAAATTTTTCTAAAAAT | 116 | 1406 |
| 1239669 | N/A | N/A | 15430 | 15449 | TGAACTCAGAAACCCCTTAC | 74 | 1407 |
| 1239691 | N/A | N/A | 15559 | 15578 | AATACCCAGCTTGTTGAGAT | 56 | 1408 |
| 1239713 | N/A | N/A | 15709 | 15728 | TCATAGGCTCCAAATCATCA | 61 | 1409 |
| 1239735 | N/A | N/A | 15803 | 15822 | ATCTCATTTACCCTGGGCAC | 60 | 1410 |
| 1239757 | N/A | N/A | 15843 | 15862 | TGTACATTCATCAAATCAAA | 82 | 1411 |
| 1239779 | N/A | N/A | 15892 | 15911 | AACAAACAGATCAAACATCC | 69 | 1412 |
| 1239801 | N/A | N/A | 16014 | 16033 | CAACTCTTTCTCCTGCTCCA | 45 | 1413 |

TABLE 20
Reduction of PRNP RNA

| | SEQ ID | SEQ ID | SEQ ID | SEQ ID | | | |
|---|---|---|---|---|---|---|---|
| | NO: 1 | NO: 1 | NO: 2 | NO: 2 | | PRNP | |
| Compound | Start | Stop | Start | Stop | | (% UTC) | SEQ ID |
| ID | Site | Site | Site | Site | Sequence (5′ to 3′) | RTS42354 | NO |
| 1201142 | 1963 | 1982 | 17754 | 17773 | GCCACATATAGGGTCCTTTA | 10 | 66 |
| 1238130 | 62 | 81 | 3155 | 3174 | TTGACTGTAAAAATCATCTT | 110 | 1414 |
| 1238152 | 131 | 150 | 3224 | 3243 | TGAGATTCGCTTGAACACTT | 101 | 1415 |
| 1238174 | 587 | 606 | 16378 | 16397 | CTGCCCCCAGCCACCACCGC | 64 | 1416 |
| 1238196 | 606 | 625 | 16397 | 16416 | CCCAGCCACCACCATGAGGC | 80 | 1417 |
| | 630 | 649 | 16421 | 16440 | | | |
| | 678 | 697 | 16469 | 16488 | | | |
| 1238218 | 1039 | 1058 | 16830 | 16849 | ACCACGCGCTCCATCATCTT | 54 | 1418 |
| 1238240 | 1326 | 1345 | 17117 | 17136 | CCAGTGCCCATCAGTGCCAA | 31 | 1419 |
| 1238262 | 1463 | 1482 | 17254 | 17273 | CACTAAGTCCAAAAATAAGT | 69 | 1420 |
| 1238284 | 1619 | 1638 | 17410 | 17429 | GGGTTTTCTTAAAATGGAAA | 18 | 1421 |
| 1238306 | 1763 | 1782 | 17554 | 17573 | AAAGTAAAACATCACCCCAG | 60 | 1422 |
| 1238328 | 1819 | 1838 | 17610 | 17629 | AGTGTTGTGACAATATTTAC | 17 | 1423 |
| 1238350 | 1865 | 1884 | 17656 | 17675 | TGTTACAGTTATGTTCACTG | 18 | 1424 |
| 1238372 | 1900 | 1919 | 17691 | 17710 | ACATTTGATTTCAAGTCCCA | 11 | 1425 |
| 1238394 | 1953 | 1972 | 17744 | 17763 | GGGTCCTTTAAACATCTAAA | 49 | 1426 |
| 1238416 | 2017 | 2036 | 17808 | 17827 | GAAGGCAATTTACTTTTCAG | 100 | 1427 |
| 1238438 | 2071 | 2090 | 17862 | 17881 | AAATCATTCTGGTTTCCAGG | 23 | 1428 |
| 1238460 | 2107 | 2126 | 17898 | 17917 | ATGGTGCTTTCACAACTGCA | 18 | 1429 |
| 1238482 | 2136 | 2155 | 17927 | 17946 | ATTTTTTAATTACATCATCC | 106 | 1430 |
| 1238504 | 2163 | 2182 | 17954 | 17973 | AGCAGTTCTTTTCTTTGCAC | 57 | 1431 |
| 1238526 | 2219 | 2238 | 18010 | 18029 | TGAACTTGACCTAATTCTGG | 48 | 1432 |
| 1238548 | 2258 | 2277 | 18049 | 18068 | CTCCCTATTCTTTGATTCAA | 57 | 1433 |
| 1238570 | 2291 | 2310 | 18082 | 18101 | GTCATCTCCAACCTAAGATA | 48 | 1434 |
| 1238592 | 2314 | 2333 | 18105 | 18124 | CACTTCAAATCAATCATATT | 99 | 1435 |
| 1238614 | 2351 | 2370 | 18142 | 18161 | ATTTTACTTTAATTAACATT | 117 | 1436 |
| 1238636 | 2393 | 2412 | 18184 | 18203 | TACATATCTGCTAGGTGACA | 20 | 1437 |
| 1238658 | 2482 | 2501 | 18273 | 18292 | TCCTATGCAATATATATTTT | 100 | 1438 |
| 1238680 | 2554 | 2573 | 18345 | 18364 | TCAGTACCTTACAAAAGTTA | 71 | 1439 |
| 1238702 | 2673 | 2692 | 18464 | 18483 | AGTACATGCATATTTCAAAG | 24 | 1440 |
| 1238724 | 2754 | 2773 | 18545 | 18564 | TTTCAGTCAGATATTAAACA | 95 | 1441 |
| 1238746 | N/A | N/A | 4788 | 4807 | CGGGAAACACTTCAAATCAT | 54 | 1442 |
| 1238768 | N/A | N/A | 4837 | 4856 | TTTGTAAAAATCCTTAATCC | 117 | 1443 |
| 1238790 | N/A | N/A | 4885 | 4904 | TTTAACATATTTATCCAATT | 124 | 1444 |
| 1238812 | N/A | N/A | 4940 | 4959 | GGTGATTTTTTCCTTTCTTC | 8 | 1445 |
| 1238834 | N/A | N/A | 5002 | 5021 | TAGCTTTTTTTCACTGTAAG | 22 | 1446 |
| 1238856 | N/A | N/A | 5054 | 5073 | AATAACATACAAATCACATC | 108 | 1447 |
| 1238878 | N/A | N/A | 5112 | 5131 | TTTATCTATTATAATCTTAA | 92 | 1448 |
| 1238900 | N/A | N/A | 5152 | 5171 | AATTTGCATTTTATTGTGTA | 70 | 1449 |
| 1238922 | N/A | N/A | 5218 | 5237 | GTTGCTGTTACTATTAATTA | 79 | 1450 |
| 1238944 | N/A | N/A | 5390 | 5409 | GAAAGTAGCTATCATTTCCT | 73 | 1451 |
| 1238966 | N/A | N/A | 5472 | 5491 | TTCTTAATGCATCACCAGAT | 52 | 1452 |
| 1238988 | N/A | N/A | 5600 | 5619 | TTAGGCTCTTTTCCAGGTGT | 17 | 1453 |
| 1239010 | N/A | N/A | 5668 | 5687 | TGGTTACATAATGTTCATTT | 3 | 1454 |
| 1239032 | N/A | N/A | 5721 | 5740 | TTACTTGTCAGTTTTTCCCC | 34 | 1455 |
| 1239054 | N/A | N/A | 5801 | 5820 | ATTTTCTGTGCTTTTCCTTT | 33 | 1456 |
| 1239076 | N/A | N/A | 5951 | 5970 | TAACAATCTCTCCTTTCTCT | 68 | 1457 |
| 1239098 | N/A | N/A | 6263 | 6282 | GACTTTCAACCTTCCTAAGA | 62 | 1458 |
| 1239120 | N/A | N/A | 6390 | 6409 | TTAAGCTGATTTTACAAGAA | 89 | 1459 |
| 1239142 | N/A | N/A | 6478 | 6497 | TGTTATTTGATTACATTATT | 71 | 1460 |
| 1239164 | N/A | N/A | 6570 | 6589 | AAGTTCAGAGAATCTTTCAC | 79 | 1461 |
| 1239186 | N/A | N/A | 6788 | 6807 | GGAATGGTTAACACATCGAC | 58 | 1462 |
| 1239208 | N/A | N/A | 6952 | 6971 | CTATAAAAGCTTCTCAGGGA | 69 | 1463 |
| 1239230 | N/A | N/A | 7385 | 7404 | GTAAGAACTTATCCCAAGGT | 35 | 1464 |
| 1239252 | N/A | N/A | 8042 | 8061 | TAAATGGCACTTTCTTTTTA | 58 | 1465 |
| 1239274 | N/A | N/A | 8245 | 8264 | TTGATAGGGATTCTATGGAA | 59 | 1466 |
| 1239296 | N/A | N/A | 8544 | 8563 | GTGTGATACATCACAGTAAC | 77 | 1467 |
| 1239318 | N/A | N/A | 8938 | 8957 | AAATACAGGACATTCCATCC | 87 | 1468 |
| 1239340 | N/A | N/A | 9242 | 9261 | ATCTAGGATTTAACCTGAAA | 100 | 1469 |
| 1239362 | N/A | N/A | 9462 | 9481 | TCTATTGCTTTTATGCTATT | 65 | 1470 |
| 1239384 | N/A | N/A | 9780 | 9799 | CCAACTTATTTTAACAGTTT | 70 | 1471 |
| 1239406 | N/A | N/A | 10475 | 10494 | AGGACAGTAACATCATAGAA | 59 | 1472 |
| 1239428 | N/A | N/A | 10745 | 10764 | TGATTAGCTTAACACACATT | 88 | 1473 |
| 1239450 | N/A | N/A | 11438 | 11457 | TGGATTGTCTTTCTATTAAG | 36 | 1474 |
| 1239472 | N/A | N/A | 13386 | 13405 | ACAGATATTCAAAGTAACAA | 109 | 1475 |
| 1239494 | N/A | N/A | 13702 | 13721 | GTAATGGTCAATACCTGTTT | 55 | 1476 |
| 1239516 | N/A | N/A | 14113 | 14132 | TAACATTTTCAATTCAGTTA | 113 | 1477 |
| 1239538 | N/A | N/A | 14305 | 14324 | CACAGCAGTGTTCCTAGACA | 57 | 1478 |
| 1239560 | N/A | N/A | 14425 | 14444 | GCTTCATTATTCTCTGGAGC | 92 | 1479 |
| 1239582 | N/A | N/A | 14878 | 14897 | CAGTAGCTCTACCTTGAAAA | 72 | 1480 |
| 1239604 | N/A | N/A | 15043 | 15062 | CAGGAAATCAAACTAGGGCA | 65 | 1481 |
| 1239626 | N/A | N/A | 15289 | 15308 | CATCCTGTTTATGTTTCTAC | 58 | 1482 |
| 1239648 | N/A | N/A | 15394 | 15413 | GCTGCAAATTTTTCTAAAAA | 84 | 1483 |
| 1239670 | N/A | N/A | 15431 | 15450 | GTGAACTCAGAAACCCCTTA | 39 | 1484 |
| 1239692 | N/A | N/A | 15620 | 15639 | TGATCTGCAATTGTTTTTCT | 49 | 1485 |
| 1239714 | N/A | N/A | 15710 | 15729 | ATCATAGGCTCCAAATCATC | 66 | 1486 |
| 1239736 | N/A | N/A | 15804 | 15823 | GATCTCATTTACCCTGGGCA | 94 | 1487 |
| 1239758 | N/A | N/A | 15844 | 15863 | ATGTACATTCATCAAATCAA | 67 | 1488 |
| 1239780 | N/A | N/A | 15893 | 15912 | CAACAAACAGATCAAACATC | 92 | 1489 |
| 1239802 | N/A | N/A | 16017 | 16036 | ACACAACTCTTTCTCCTGCT | 44 | 1490 |

TABLE 21
Reduction of PRNP RNA

| | SEQ ID | SEQ ID | SEQ ID | SEQ ID | | | |
|---|---|---|---|---|---|---|---|
| | NO: 1 | NO: 1 | NO: 2 | NO: 2 | | PRNP | |
| Compound | Start | Stop | Start | Stop | | (% UTC) | SEQ |
| ID | Site | Site | Site | Site | Sequence (5′ to 3′) | RTS42354 | ID NO |
| 1201142 | 1963 | 1982 | 17754 | 17773 | GCCACATATAGGGTCCTTTA | 13 | 66 |
| 1238131 | 63 | 82 | 3156 | 3175 | ATTGACTGTAAAAATCATCT | 91 | 1491 |
| 1238153 | 132 | 151 | 3225 | 3244 | TTGAGATTCGCTTGAACACT | 117 | 1492 |
| 1238175 | 597 | 616 | 16388 | 16407 | CACCATGAGGCTGCCCCCAG | 72 | 1493 |
| | 621 | 640 | 16412 | 16431 | | | |
| 1238197 | 683 | 702 | 16474 | 16493 | TTGACCCCAGCCACCACCAT | 64 | 1494 |
| 1238219 | 1048 | 1067 | 16839 | 16858 | ATCTGCTCAACCACGCGCTC | 84 | 1495 |
| 1238241 | 1327 | 1346 | 17118 | 17137 | TCCAGTGCCCATCAGTGCCA | 38 | 1496 |
| 1238263 | 1464 | 1483 | 17255 | 17274 | GCACTAAGTCCAAAAATAAG | 82 | 1497 |
| 1238285 | 1620 | 1639 | 17411 | 17430 | CGGGTTTTCTTAAAATGGAA | 13 | 1498 |
| 1238307 | 1764 | 1783 | 17555 | 17574 | AAAAGTAAAACATCACCCCA | 87 | 1499 |
| 1238329 | 1821 | 1840 | 17612 | 17631 | TCAGTGTTGTGACAATATTT | 9 | 1500 |
| 1238351 | 1866 | 1885 | 17657 | 17676 | ATGTTACAGTTATGTTCACT | 16 | 1501 |
| 1238373 | 1901 | 1920 | 17692 | 17711 | AACATTTGATTTCAAGTCCC | 8 | 1502 |
| 1238395 | 1955 | 1974 | 17746 | 17765 | TAGGGTCCTTTAAACATCTA | 68 | 1503 |
| 1238417 | 2019 | 2038 | 17810 | 17829 | TAGAAGGCAATTTACTTTTC | 72 | 1504 |
| 1238439 | 2074 | 2093 | 17865 | 17884 | TCAAAATCATTCTGGTTTCC | 50 | 1505 |
| 1238461 | 2108 | 2127 | 17899 | 17918 | GATGGTGCTTTCACAACTGC | 25 | 1506 |
| 1238483 | 2137 | 2156 | 17928 | 17947 | CATTTTTTAATTACATCATC | 118 | 1507 |
| 1238505 | 2164 | 2183 | 17955 | 17974 | AAGCAGTTCTTTTCTTTGCA | 35 | 1508 |
| 1238527 | 2220 | 2239 | 18011 | 18030 | ATGAACTTGACCTAATTCTG | 46 | 1509 |
| 1238549 | 2259 | 2278 | 18050 | 18069 | TCTCCCTATTCTTTGATTCA | 47 | 1510 |
| 1238571 | 2292 | 2311 | 18083 | 18102 | TGTCATCTCCAACCTAAGAT | 31 | 1511 |
| 1238593 | 2315 | 2334 | 18106 | 18125 | CCACTTCAAATCAATCATAT | 49 | 1512 |
| 1238615 | 2357 | 2376 | 18148 | 18167 | GGAATAATTTTACTTTAATT | 123 | 1513 |
| 1238637 | 2395 | 2414 | 18186 | 18205 | AATACATATCTGCTAGGTGA | 25 | 1514 |
| 1238659 | 2484 | 2503 | 18275 | 18294 | TGTCCTATGCAATATATATT | 69 | 1515 |
| 1238681 | 2555 | 2574 | 18346 | 18365 | TTCAGTACCTTACAAAAGTT | 89 | 1516 |
| 1238703 | 2676 | 2695 | 18467 | 18486 | TAAAGTACATGCATATTTCA | 74 | 1517 |
| 1238725 | 2780 | 2799 | 18571 | 18590 | GGTGGTGCTCATCTTCGCTC | 62 | 1518 |
| 1238747 | N/A | N/A | 4793 | 4812 | GGAAACGGGAAACACTTCAA | 69 | 1519 |
| 1238769 | N/A | N/A | 4840 | 4859 | ATATTTGTAAAAATCCTTAA | 108 | 1520 |
| 1238791 | N/A | N/A | 4886 | 4905 | GTTTAACATATTTATCCAAT | 25 | 1521 |
| 1238813 | N/A | N/A | 4941 | 4960 | TGGTGATTTTTTCCTTTCTT | 16 | 1522 |
| 1238835 | N/A | N/A | 5003 | 5022 | TTAGCTTTTTTTCACTGTAA | 11 | 1523 |
| 1238857 | N/A | N/A | 5059 | 5078 | ATATAAATAACATACAAATC | 105 | 1524 |
| 1238879 | N/A | N/A | 5113 | 5132 | ATTTATCTATTATAATCTTA | 104 | 1525 |
| 1238901 | N/A | N/A | 5154 | 5173 | CTAATTTGCATTTTATTGTG | 48 | 1526 |
| 1238923 | V/A | N/A | 5244 | 5263 | AAGTTTTGGGCAACCTTCCA | 78 | 1527 |
| 1238945 | N/A | N/A | 5391 | 5410 | AGAAAGTAGCTATCATTTCC | 57 | 1528 |
| 1238967 | N/A | N/A | 5474 | 5493 | GCTTCTTAATGCATCACCAG | 30 | 1529 |
| 1238989 | N/A | N/A | 5601 | 5620 | TTTAGGCTCTTTTCCAGGTG | 18 | 1530 |
| 1239011 | N/A | N/A | 5669 | 5688 | GTGGTTACATAATGTTCATT | 11 | 1531 |
| 1239033 | N/A | N/A | 5726 | 5745 | CTTTTTTACTTGTCAGTTTT | 48 | 1532 |
| 1239055 | N/A | N/A | 5825 | 5844 | CCGACAATTTCAATGAAAAC | 61 | 1533 |
| 1239077 | N/A | N/A | 5954 | 5973 | ATATAACAATCTCTCCTTTC | 72 | 1534 |
| 1239099 | N/A | N/A | 6264 | 6283 | TGACTTTCAACCTTCCTAAG | 80 | 1535 |
| 1239121 | N/A | N/A | 6407 | 6426 | GCCATTTCTCTGCAAAATTA | 41 | 1536 |
| 1239143 | N/A | N/A | 6479 | 6498 | TTGTTATTTGATTACATTAT | 66 | 1537 |
| 1239165 | N/A | N/A | 6586 | 6605 | AAGTAAGTTAAAACTGAAGT | 94 | 1538 |
| 1239187 | N/A | N/A | 6836 | 6855 | GATCACACAATACTGTAACA | 30 | 1539 |
| 1239209 | N/A | N/A | 6981 | 7000 | GAGAGTGCCTAGCGATGGGA | 98 | 1540 |
| 1239231 | N/A | N/A | 7388 | 7407 | CTAGTAAGAACTTATCCCAA | 36 | 1541 |
| 1239253 | N/A | N/A | 8043 | 8062 | GTAAATGGCACTTTCTTTTT | 22 | 1542 |
| 1239275 | N/A | N/A | 8302 | 8321 | CCTTCACCCAATTTTAGGAT | 66 | 1543 |
| 1239297 | N/A | N/A | 8545 | 8564 | AGTGTGATACATCACAGTAA | 92 | 1544 |
| 1239319 | N/A | N/A | 8947 | 8966 | CAAACAGACAAATACAGGAC | 77 | 1545 |
| 1239341 | N/A | N/A | 9277 | 9296 | AACATTCATTCATAATGGCA | 60 | 1546 |
| 1239363 | N/A | N/A | 9464 | 9483 | AATCTATTGCTTTTATGCTA | 81 | 1547 |
| 1239385 | N/A | N/A | 9781 | 9800 | CCCAACTTATTTTAACAGTT | 57 | 1548 |
| 1239407 | N/A | N/A | 10529 | 10548 | GAGAAATTTCTATTTTCCTC | 60 | 1549 |
| 1239429 | N/A | N/A | 10746 | 10765 | TTGATTAGCTTAACACACAT | 53 | 1550 |
| 1239451 | N/A | N/A | 11439 | 11458 | ATGGATTGTCTTTCTATTAA | 24 | 1551 |
| 1239473 | N/A | N/A | 13415 | 13434 | ACAGTAGCAATAACTGACCA | 86 | 1552 |
| 1239495 | N/A | N/A | 13718 | 13737 | TCCTATTAAGTATATGGTAA | 119 | 1553 |
| 1239517 | N/A | N/A | 14114 | 14133 | CTAACATTTTCAATTCAGTT | 45 | 1554 |
| 1239539 | N/A | N/A | 14318 | 14337 | GTTTGGTTTTGTTCACAGCA | 25 | 1555 |
| 1239561 | N/A | N/A | 14427 | 14446 | TGGCTTCATTATTCTCTGGA | 33 | 1556 |
| 1239583 | N/A | N/A | 14879 | 14898 | TCAGTAGCTCTACCTTGAAA | 83 | 1557 |
| 1239605 | N/A | N/A | 15103 | 15122 | GATGTAGTCCCCACAATCTC | 120 | 1558 |
| 1239627 | N/A | N/A | 15290 | 15309 | ACATCCTGTTTATGTTTCTA | 42 | 1559 |
| 1239649 | N/A | N/A | 15395 | 15414 | AGCTGCAAATTTTTCTAAAA | 99 | 1560 |
| 1239671 | N/A | N/A | 15432 | 15451 | TGTGAACTCAGAAACCCCTT | 60 | 1561 |
| 1239693 | N/A | N/A | 15622 | 15641 | GATGATCTGCAATTGTTTTT | 59 | 1562 |
| 1239715 | N/A | N/A | 15718 | 15737 | TAGGTCAAATCATAGGCTCC | 72 | 1563 |
| 1239737 | N/A | N/A | 15805 | 15824 | AGATCTCATTTACCCTGGGC | 80 | 1564 |
| 1239759 | N/A | N/A | 15845 | 15864 | AATGTACATTCATCAAATCA | 98 | 1565 |
| 1239781 | N/A | N/A | 15899 | 15918 | CCAAAACAACAAACAGATCA | 90 | 1566 |
| 1239803 | N/A | N/A | 16018 | 16037 | AACACAACTCTTTCTCCTGC | 57 | 1567 |

TABLE 22
Reduction of PRNP RNA

| | SEQ ID | SEQ ID | SEQ ID | SEQ ID | | | |
|---|---|---|---|---|---|---|---|
| | NO: 1 | NO: 1 | NO: 2 | NO: 2 | | PRNP | |
| Compound | Start | Stop | Start | Stop | | (% UTC) | SEQ |
| ID | Site | Site | Site | Site | Sequence (5′ to 3′) | RTS42354 | ID NO |
| 1201142 | 1963 | 1982 | 17754 | 17773 | GCCACATATAGGGTCCTTTA | 11 | 66 |
| 1238132 | 65 | 84 | 3158 | 3177 | TCATTGACTGTAAAAATCAT | 93 | 1568 |
| 1238154 | 134 | 153 | 3227 | 3246 | AGTTGAGATTCGCTTGAACA | 107 | 1569 |
| 1238176 | 598 | 617 | 16389 | 16408 | CCACCATGAGGCTGCCCCCA | 64 | 1570 |
| | 622 | 641 | 16413 | 16432 | | | |
| 1238198 | 687 | 706 | 16478 | 16497 | CTCCTTGACCCCAGCCACCA | 64 | 1571 |
| 1238220 | 1055 | 1074 | 16846 | 16865 | GATACACATCTGCTCAACCA | 34 | 1572 |
| 1238242 | 1328 | 1347 | 17119 | 17138 | TTCCAGTGCCCATCAGTGCC | 41 | 1573 |
| 1238264 | 1469 | 1488 | 17260 | 17279 | CTGTTGCACTAAGTCCAAAA | 15 | 1574 |
| 1238286 | 1621 | 1640 | 17412 | 17431 | TCGGGTTTTCTTAAAATGGA | 17 | 1575 |
| 1238308 | 1765 | 1784 | 17556 | 17575 | GAAAAGTAAAACATCACCCC | 54 | 1576 |
| 1238330 | 1823 | 1842 | 17614 | 17633 | GTTCAGTGTTGTGACAATAT | 10 | 1577 |
| 1238352 | 1867 | 1886 | 17658 | 17677 | TATGTTACAGTTATGTTCAC | 45 | 1578 |
| 1238374 | 1902 | 1921 | 17693 | 17712 | AAACATTTGATTTCAAGTCC | 17 | 1579 |
| 1238396 | 1957 | 1976 | 17748 | 17767 | TATAGGGTCCTTTAAACATC | 23 | 1580 |
| 1238418 | 2020 | 2039 | 17811 | 17830 | CTAGAAGGCAATTTACTTTT | 86 | 1581 |
| 1238440 | 2075 | 2094 | 17866 | 17885 | GTCAAAATCATTCTGGTTTC | 8 | 1582 |
| 1238462 | 2109 | 2128 | 17900 | 17919 | TGATGGTGCTTTCACAACTG | 26 | 1583 |
| 1238484 | 2139 | 2158 | 17930 | 17949 | ACCATTTTTTAATTACATCA | 60 | 1584 |
| 1238506 | 2165 | 2184 | 17956 | 17975 | CAAGCAGTTCTTTTCTTTGC | 10 | 1585 |
| 1238528 | 2222 | 2241 | 18013 | 18032 | CTATGAACTTGACCTAATTC | 67 | 1586 |
| 1238550 | 2260 | 2279 | 18051 | 18070 | GTCTCCCTATTCTTTGATTC | 37 | 1587 |
| 1238572 | 2293 | 2312 | 18084 | 18103 | CTGTCATCTCCAACCTAAGA | 25 | 1588 |
| 1238594 | 2316 | 2335 | 18107 | 18126 | TCCACTTCAAATCAATCATA | 35 | 1589 |
| 1238616 | 2360 | 2379 | 18151 | 18170 | CAGGGAATAATTTTACTTTA | 27 | 1590 |
| 1238638 | 2397 | 2416 | 18188 | 18207 | GTAATACATATCTGCTAGGT | 19 | 1591 |
| 1238660 | 2486 | 2505 | 18277 | 18296 | TCTGTCCTATGCAATATATA | 62 | 1592 |
| 1238682 | 2556 | 2575 | 18347 | 18366 | ATTCAGTACCTTACAAAAGT | 54 | 1593 |
| 1238704 | 2699 | 2718 | 18490 | 18509 | CAAAGTTACAAATATAGAAA | 97 | 1594 |
| 1238726 | N/A | N/A | 3543 | 3562 | CCCGCGGCTCCCCTGCCCCC | 93 | 1595 |
| 1238748 | N/A | N/A | 4807 | 4826 | GGAGTTTTCCCTAAGGAAAC | 79 | 1596 |
| 1238770 | N/A | N/A | 4841 | 4860 | TATATTTGTAAAAATCCTTA | 93 | 1597 |
| 1238792 | N/A | N/A | 4887 | 4906 | AGTTTAACATATTTATCCAA | 69 | 1598 |
| 1238814 | N/A | N/A | 4942 | 4961 | CTGGTGATTTTTTCCTTTCT | 10 | 1599 |
| 1238836 | N/A | N/A | 5004 | 5023 | GTTAGCTTTTTTTCACTGTA | 9 | 1600 |
| 1238858 | N/A | N/A | 5062 | 5081 | TAGATATAAATAACATACAA | 92 | 1601 |
| 1238880 | N/A | N/A | 5114 | 5133 | CATTTATCTATTATAATCTT | 86 | 1602 |
| 1238902 | N/A | N/A | 5155 | 5174 | TCTAATTTGCATTTTATTGT | 86 | 1603 |
| 1238924 | N/A | N/A | 5246 | 5265 | CCAAGTTTTGGGCAACCTTC | 43 | 1604 |
| 1238946 | N/A | N/A | 5392 | 5411 | CAGAAAGTAGCTATCATTTC | 57 | 1605 |
| 1238968 | N/A | N/A | 5476 | 5495 | CAGCTTCTTAATGCATCACC | 24 | 1606 |
| 1238990 | N/A | N/A | 5602 | 5621 | ATTTAGGCTCTTTTCCAGGT | 6 | 1607 |
| 1239012 | N/A | N/A | 5670 | 5689 | AGTGGTTACATAATGTTCAT | 26 | 1608 |
| 1239034 | N/A | N/A | 5727 | 5746 | ACTTTTTTACTTGTCAGTTT | 49 | 1609 |
| 1239056 | N/A | N/A | 5826 | 5845 | ACCGACAATTTCAATGAAAA | 42 | 1610 |
| 1239078 | N/A | N/A | 5958 | 5977 | GCAAATATAACAATCTCTCC | 55 | 1611 |
| 1239100 | N/A | N/A | 6266 | 6285 | GGTGACTTTCAACCTTCCTA | 52 | 1612 |
| 1239122 | N/A | N/A | 6411 | 6430 | TGTGGCCATTTCTCTGCAAA | 94 | 1613 |
| 1239144 | N/A | N/A | 6481 | 6500 | TATTGTTATTTGATTACATT | 97 | 1614 |
| 1239166 | N/A | N/A | 6670 | 6689 | TTTTGAATGTTTAATATGCA | 91 | 1615 |
| 1239188 | N/A | N/A | 6838 | 6857 | GTGATCACACAATACTGTAA | 76 | 1616 |
| 1239210 | N/A | N/A | 7011 | 7030 | ACATTGCTGGAACCCATCAC | 86 | 1617 |
| 1239232 | N/A | N/A | 7389 | 7408 | GCTAGTAAGAACTTATCCCA | 43 | 1618 |
| 1239254 | N/A | N/A | 8044 | 8063 | TGTAAATGGCACTTTCTTTT | 26 | 1619 |
| 1239276 | N/A | N/A | 8303 | 8322 | ACCTTCACCCAATTTTAGGA | 61 | 1620 |
| 1239298 | N/A | N/A | 8546 | 8565 | AAGTGTGATACATCACAGTA | 91 | 1621 |
| 1239320 | N/A | N/A | 8948 | 8967 | CCAAACAGACAAATACAGGA | 68 | 1622 |
| 1239342 | N/A | N/A | 9304 | 9323 | GCTGTAGTTAAACATTTCAT | 21 | 1623 |
| 1239364 | N/A | N/A | 9472 | 9491 | TGAACAATAATCTATTGCTT | 57 | 1624 |
| 1239386 | N/A | N/A | 9782 | 9801 | ACCCAACTTATTTTAACAGT | 64 | 1625 |
| 1239408 | N/A | N/A | 10531 | 10550 | GAGAGAAATTTCTATTTTCC | 56 | 1626 |
| 1239430 | N/A | N/A | 10747 | 10766 | ATTGATTAGCTTAACACACA | 48 | 1627 |
| 1239452 | N/A | N/A | 11475 | 11494 | ATGCAACTTTCCTTAATGAA | 23 | 1628 |
| 1239474 | N/A | N/A | 13417 | 13436 | CTACAGTAGCAATAACTGAC | 91 | 1629 |
| 1239496 | N/A | N/A | 13726 | 13745 | TCAAGATATCCTATTAAGTA | 83 | 1630 |
| 1239518 | N/A | N/A | 14115 | 14134 | GCTAACATTTTCAATTCAGT | 23 | 1631 |
| 1239540 | N/A | N/A | 14321 | 14340 | GGAGTTTGGTTTTGTTCACA | 21 | 1632 |
| 1239562 | N/A | N/A | 14472 | 14491 | CCATCACTCTACCTAAAACA | 97 | 1633 |
| 1239584 | N/A | N/A | 14892 | 14911 | CTATCAGCAAATCTCAGTAG | 59 | 1634 |
| 1239606 | N/A | N/A | 15161 | 15180 | TTGGAGGCTCTTTTAGGTGG | 40 | 1635 |
| 1239628 | N/A | N/A | 15293 | 15312 | TTAACATCCTGTTTATGTTT | 94 | 1636 |
| 1239650 | N/A | N/A | 15396 | 15415 | TAGCTGCAAATTTTTCTAAA | 74 | 1637 |
| 1239672 | N/A | N/A | 15433 | 15452 | TTGTGAACTCAGAAACCCCT | 60 | 1638 |
| 1239694 | N/A | N/A | 15624 | 15643 | GGGATGATCTGCAATTGTTT | 29 | 1639 |
| 1239716 | N/A | N/A | 15719 | 15738 | CTAGGTCAAATCATAGGCTC | 75 | 1640 |
| 1239738 | N/A | N/A | 15808 | 15827 | TAAAGATCTCATTTACCCTG | 85 | 1641 |
| 1239760 | N/A | N/A | 15846 | 15865 | GAATGTACATTCATCAAATC | 92 | 1642 |
| 1239782 | N/A | N/A | 15900 | 15919 | ACCAAAACAACAAACAGATC | 93 | 1643 |
| 1239804 | N/A | N/A | 16020 | 16039 | TGAACACAACTCTTTCTCCT | 71 | 1644 |

TABLE 23
Reduction of PRNP RNA

| | SEQ ID | SEQ ID | SEQ ID | SEQ ID | | | |
|---|---|---|---|---|---|---|---|
| | NO: 1 | NO: 1 | NO: 2 | NO: 2 | | PRNP | |
| Compound | Start | Stop | Start | Stop | | (% UTC) | SEQ ID |
| ID | Site | Site | Site | Site | Sequence (5′ to 3′) | RTS42354 | NO |
| 1201142 | 1963 | 1982 | 17754 | 17773 | GCCACATATAGGGTCCTTTA | 11 | 66 |
| 1238133 | 66 | 85 | 3159 | 3178 | CTCATTGACTGTAAAAATCA | 131 | 1645 |
| 1238155 | 135 | 154 | 3228 | 3247 | GAGTTGAGATTCGCTTGAAC | 102 | 1646 |
| 1238177 | 599 | 618 | 16390 | 16409 | ACCACCATGAGGCTGCCCCC | 69 | 1647 |
| | 623 | 642 | 16414 | 16433 | | | |
| 1238199 | 695 | 714 | 16486 | 16505 | GGTGCCACCTCCTTGACCCC | 90 | 1648 |
| 1238221 | 1060 | 1079 | 16851 | 16870 | TGGGTGATACACATCTGCTC | 65 | 1649 |
| 1238243 | 1329 | 1348 | 17120 | 17139 | TTTCCAGTGCCCATCAGTGC | 30 | 1650 |
| 1238265 | 1479 | 1498 | 17270 | 17289 | TAGCCTCAACCTGTTGCACT | 49 | 1651 |
| 1238287 | 1650 | 1669 | 17441 | 17460 | GCCTCCTAACAAACCTGGCA | 100 | 1652 |
| 1238309 | 1766 | 1785 | 17557 | 17576 | TGAAAAGTAAAACATCACCC | 41 | 1653 |
| 1238331 | 1824 | 1843 | 17615 | 17634 | GGTTCAGTGTTGTGACAATA | 9 | 1654 |
| 1238353 | 1868 | 1887 | 17659 | 17678 | ATATGTTACAGTTATGTTCA | 21 | 1655 |
| 1238375 | 1903 | 1922 | 17694 | 17713 | CAAACATTTGATTTCAAGTC | 69 | 1656 |
| 1238397 | 1958 | 1977 | 17749 | 17768 | ATATAGGGTCCTTTAAACAT | 42 | 1657 |
| 1238419 | 2021 | 2040 | 17812 | 17831 | TCTAGAAGGCAATTTACTTT | 123 | 1658 |
| 1238441 | 2076 | 2095 | 17867 | 17886 | TGTCAAAATCATTCTGGTTT | 18 | 1659 |
| 1238463 | 2110 | 2129 | 17901 | 17920 | ATGATGGTGCTTTCACAACT | 29 | 1660 |
| 1238485 | 2140 | 2159 | 17931 | 17950 | GACCATTTTTTAATTACATC | 49 | 1661 |
| 1238507 | 2166 | 2185 | 17957 | 17976 | GCAAGCAGTTCTTTTCTTTG | 7 | 1662 |
| 1238529 | 2226 | 2245 | 18017 | 18036 | GAAACTATGAACTTGACCTA | 51 | 1663 |
| 1238551 | 2261 | 2280 | 18052 | 18071 | TGTCTCCCTATTCTTTGATT | 32 | 1664 |
| 1238573 | 2294 | 2313 | 18085 | 18104 | TCTGTCATCTCCAACCTAAG | 27 | 1665 |
| 1238595 | 2317 | 2336 | 18108 | 18127 | TTCCACTTCAAATCAATCAT | 37 | 1666 |
| 1238617 | 2361 | 2380 | 18152 | 18171 | TCAGGGAATAATTTTACTTT | 29 | 1667 |
| 1238639 | 2398 | 2417 | 18189 | 18208 | AGTAATACATATCTGCTAGG | 31 | 1668 |
| 1238661 | 2487 | 2506 | 18278 | 18297 | GTCTGTCCTATGCAATATAT | 53 | 1669 |
| 1238683 | 2557 | 2576 | 18348 | 18367 | TATTCAGTACCTTACAAAAG | 82 | 1670 |
| 1238705 | 2700 | 2719 | 18491 | 18510 | GCAAAGTTACAAATATAGAA | 59 | 1671 |
| 1238749 | N/A | N/A | 4808 | 4827 | AGGAGTTTTCCCTAAGGAAA | 60 | 1672 |
| 1238771 | N/A | N/A | 4842 | 4861 | TTATATTTGTAAAAATCCTT | 94 | 1673 |
| 1238793 | N/A | N/A | 4888 | 4907 | AAGTTTAACATATTTATCCA | 87 | 1674 |
| 1238815 | N/A | N/A | 4943 | 4962 | ACTGGTGATTTTTTCCTTTC | 33 | 1675 |
| 1238837 | N/A | N/A | 5005 | 5024 | GGTTAGCTTTTTTTCACTGT | 8 | 1676 |
| 1238859 | N/A | N/A | 5063 | 5082 | TTAGATATAAATAACATACA | 108 | 1677 |
| 1238881 | N/A | N/A | 5115 | 5134 | CCATTTATCTATTATAATCT | 48 | 1678 |
| 1238903 | N/A | N/A | 5157 | 5176 | GCTCTAATTTGCATTTTATT | 27 | 1679 |
| 1238925 | N/A | N/A | 5262 | 5281 | CAGACACTTGAAAATGCCAA | 68 | 1680 |
| 1238947 | N/A | N/A | 5393 | 5412 | GCAGAAAGTAGCTATCATTT | 11 | 1681 |
| 1238969 | N/A | N/A | 5477 | 5496 | CCAGCTTCTTAATGCATCAC | 29 | 1682 |
| 1238991 | N/A | N/A | 5611 | 5630 | GTGTTATACATTTAGGCTCT | 11 | 1683 |
| 1239013 | N/A | N/A | 5672 | 5691 | TTAGTGGTTACATAATGTTC | 31 | 1684 |
| 1239035 | N/A | N/A | 5730 | 5749 | CCCACTTTTTTACTTGTCAG | 36 | 1685 |
| 1239057 | N/A | N/A | 5828 | 5847 | TCACCGACAATTTCAATGAA | 77 | 1686 |
| 1239079 | N/A | N/A | 5959 | 5978 | AGCAAATATAACAATCTCTC | 27 | 1687 |
| 1239101 | N/A | N/A | 6267 | 6286 | TGGTGACTTTCAACCTTCCT | 98 | 1688 |
| 1239123 | N/A | N/A | 6413 | 6432 | TCTGTGGCCATTTCTCTGCA | 46 | 1689 |
| 1239145 | N/A | N/A | 6486 | 6505 | GTTATTATTGTTATTTGATT | 54 | 1690 |
| 1239167 | N/A | N/A | 6674 | 6693 | CATGTTTTGAATGTTTAATA | 93 | 1691 |
| 1239189 | N/A | N/A | 6845 | 6864 | CCTTAAAGTGATCACACAAT | 89 | 1692 |
| 1239211 | N/A | N/A | 7142 | 7161 | CTGAAAAAAATTTTGCACAA | 90 | 1693 |
| 1239233 | N/A | N/A | 7431 | 7450 | GTTCATCTTATTCCCATTTA | 31 | 1694 |
| 1239255 | N/A | N/A | 8080 | 8099 | GCTAAATTTATTCTGAAATA | 94 | 1695 |
| 1239277 | N/A | N/A | 8311 | 8330 | AAGATGCCACCTTCACCCAA | 74 | 1696 |
| 1239299 | N/A | N/A | 8603 | 8622 | TGATACAGTGGGATTCATCC | 108 | 1697 |
| 1239321 | N/A | N/A | 8965 | 8984 | ACTTAGACCAAATGGATCCA | 85 | 1698 |
| 1239343 | N/A | N/A | 9349 | 9368 | AGTTTTTCAAATCAACAAAT | 71 | 1699 |
| 1239365 | N/A | N/A | 9519 | 9538 | CCCAAGATATCATAATTTTA | 59 | 1700 |
| 1239387 | N/A | N/A | 9785 | 9804 | AGCACCCAACTTATTTTAAC | 69 | 1701 |
| 1239409 | N/A | N/A | 10629 | 10648 | GGAGATCAAATCTGTGGAGC | 47 | 1702 |
| 1239431 | N/A | N/A | 10759 | 10778 | GCACAATAATTTATTGATTA | 105 | 1703 |
| 1239453 | N/A | N/A | 12112 | 12131 | GTAAAGATTCTTGTTCAGCA | 23 | 1704 |
| 1239475 | N/A | N/A | 13429 | 13448 | AACGGCATTCCTCTACAGTA | 86 | 1705 |
| 1239497 | N/A | N/A | 13727 | 13746 | TTCAAGATATCCTATTAAGT | 90 | 1706 |
| 1239519 | N/A | N/A | 14117 | 14136 | CAGCTAACATTTTCAATTCA | 65 | 1707 |
| 1239541 | N/A | N/A | 14342 | 14361 | AGTGCAGGCTCCTTTAGGGC | 33 | 1708 |
| 1239563 | N/A | N/A | 14526 | 14545 | AAGGCTTTTCTTCCAGCTAC | 76 | 1709 |
| 1239585 | N/A | N/A | 14893 | 14912 | TCTATCAGCAAATCTCAGTA | 90 | 1710 |
| 1239607 | N/A | N/A | 15162 | 15181 | TTTGGAGGCTCTTTTAGGTG | 19 | 1711 |
| 1239629 | N/A | N/A | 15299 | 15318 | AATAAATTAACATCCTGTTT | 83 | 1712 |
| 1239651 | N/A | N/A | 15397 | 15416 | TTAGCTGCAAATTTTTCTAA | 72 | 1713 |
| 1239673 | N/A | N/A | 15443 | 15462 | TAGAACATTTTTGTGAACTC | 30 | 1714 |
| 1239695 | N/A | N/A | 15625 | 15644 | TGGGATGATCTGCAATTGTT | 34 | 1715 |
| 1239717 | N/A | N/A | 15720 | 15739 | CCTAGGTCAAATCATAGGCT | 80 | 1716 |
| 1239739 | N/A | N/A | 15809 | 15828 | TTAAAGATCTCATTTACCCT | 118 | 1717 |
| 1239761 | N/A | N/A | 15847 | 15866 | AGAATGTACATTCATCAAAT | 74 | 1718 |
| 1239783 | N/A | N/A | 15901 | 15920 | TACCAAAACAACAAACAGAT | 77 | 1719 |
| 1239805 | N/A | N/A | 16021 | 16040 | GTGAACACAACTCTTTCTCC | 64 | 1720 |

TABLE 24
Reduction of PRNP RNA

| | SEQ ID | SEQ ID | SEQ ID | SEQ ID | | | |
|---|---|---|---|---|---|---|---|
| | NO: 1 | NO: 1 | NO: 2 | NO: 2 | | PRNP | |
| Compound | Start | Stop | Start | Stop | | (% UTC) | SEQ ID |
| ID | Site | Site | Site | Site | Sequence (5′ to 3′) | RTS42354 | NO |
| 1201142 | 1963 | 1982 | 17754 | 17773 | GCCACATATAGGGTCCTTTA | 12 | 66 |
| 1238134 | 67 | 86 | 3160 | 3179 | GCTCATTGACTGTAAAAATC | 96 | 1721 |
| 1238156 | 139 | 158 | 3232 | 3251 | AAACGAGTTGAGATTCGCTT | 101 | 1722 |
| 1238178 | 600 | 619 | 16391 | 16410 | CACCACCATGAGGCTGCCCC | 75 | 1723 |
| | 624 | 643 | 16415 | 16434 | | | |
| 1238200 | 697 | 716 | 16488 | 16507 | TGGGTGCCACCTCCTTGACC | 97 | 1724 |
| 1238222 | 1179 | 1198 | 16970 | 16989 | ACCTTCCTCATCCCACTATC | 105 | 1725 |
| 1238244 | 1336 | 1355 | 17127 | 17146 | TCTATGTTTTCCAGTGCCCA | 15 | 1726 |
| 1238266 | 1482 | 1501 | 17273 | 17292 | TTTTAGCCTCAACCTGTTGC | 48 | 1727 |
| 1238288 | 1655 | 1674 | 17446 | 17465 | ATGTGGCCTCCTAACAAACC | 86 | 1728 |
| 1238310 | 1767 | 1786 | 17558 | 17577 | GTGAAAAGTAAAACATCACC | 66 | 1729 |
| 1238332 | 1825 | 1844 | 17616 | 17635 | AGGTTCAGTGTTGTGACAAT | 31 | 1730 |
| 1238354 | 1869 | 1888 | 17660 | 17679 | TATATGTTACAGTTATGTTC | 40 | 1731 |
| 1238376 | 1904 | 1923 | 17695 | 17714 | CCAAACATTTGATTTCAAGT | 75 | 1732 |
| 1238398 | 1969 | 1988 | 17760 | 17779 | AGGAATGCCACATATAGGGT | 37 | 1733 |
| 1238420 | 2022 | 2041 | 17813 | 17832 | GTCTAGAAGGCAATTTACTT | 72 | 1734 |
| 1238442 | 2077 | 2096 | 17868 | 17887 | ATGTCAAAATCATTCTGGTT | 29 | 1735 |
| 1238464 | 2111 | 2130 | 17902 | 17921 | GATGATGGTGCTTTCACAAC | 33 | 1736 |
| 1238486 | 2141 | 2160 | 17932 | 17951 | TGACCATTTTTTAATTACAT | 83 | 1737 |
| 1238508 | 2167 | 2186 | 17958 | 17977 | TGCAAGCAGTTCTTTTCTTT | 15 | 1738 |
| 1238530 | 2227 | 2246 | 18018 | 18037 | AGAAACTATGAACTTGACCT | 29 | 1739 |
| 1238552 | 2262 | 2281 | 18053 | 18072 | TTGTCTCCCTATTCTTTGAT | 38 | 1740 |
| 1238574 | 2295 | 2314 | 18086 | 18105 | TTCTGTCATCTCCAACCTAA | 41 | 1741 |
| 1238596 | 2318 | 2337 | 18109 | 18128 | TTTCCACTTCAAATCAATCA | 49 | 1742 |
| 1238618 | 2362 | 2381 | 18153 | 18172 | TTCAGGGAATAATTTTACTT | 48 | 1743 |
| 1238640 | 2399 | 2418 | 18190 | 18209 | AAGTAATACATATCTGCTAG | 47 | 1744 |
| 1238662 | 2503 | 2522 | 18294 | 18313 | TAAACAAAACTCCTAAGTCT | 111 | 1745 |
| 1238684 | 2558 | 2577 | 18349 | 18368 | GTATTCAGTACCTTACAAAA | 43 | 1746 |
| 1238706 | 2701 | 2720 | 18492 | 18511 | TGCAAAGTTACAAATATAGA | 85 | 1747 |
| 1238728 | N/A | N/A | 4709 | 4728 | AGATCCTCATCATTACAGCA | 87 | 1748 |
| 1238750 | N/A | N/A | 4809 | 4828 | CAGGAGTTTTCCCTAAGGAA | 48 | 1749 |
| 1238772 | N/A | N/A | 4848 | 4867 | TGATAATTATATTTGTAAAA | 108 | 1750 |
| 1238794 | N/A | N/A | 4889 | 4908 | GAAGTTTAACATATTTATCC | 38 | 1751 |
| 1238816 | N/A | N/A | 4945 | 4964 | CCACTGGTGATTTTTTCCTT | 36 | 1752 |
| 1238838 | N/A | N/A | 5006 | 5025 | TGGTTAGCTTTTTTTCACTG | 12 | 1753 |
| 1238860 | N/A | N/A | 5064 | 5083 | GTTAGATATAAATAACATAC | 48 | 1754 |
| 1238882 | N/A | N/A | 5116 | 5135 | GCCATTTATCTATTATAATC | 32 | 1755 |
| 1238904 | N/A | N/A | 5159 | 5178 | ATGCTCTAATTTGCATTTTA | 59 | 1756 |
| 1238926 | N/A | N/A | 5263 | 5282 | CCAGACACTTGAAAATGCCA | 75 | 1757 |
| 1238948 | N/A | N/A | 5394 | 5413 | CGCAGAAAGTAGCTATCATT | 33 | 1758 |
| 1238970 | N/A | N/A | 5480 | 5499 | CTTCCAGCTTCTTAATGCAT | 64 | 1759 |
| 1238992 | N/A | N/A | 5613 | 5632 | TGGTGTTATACATTTAGGCT | 20 | 1760 |
| 1239014 | N/A | N/A | 5680 | 5699 | CATGATTTTTAGTGGTTACA | 11 | 1761 |
| 1239036 | N/A | N/A | 5732 | 5751 | AACCCACTTTTTTACTTGTC | 55 | 1762 |
| 1239058 | N/A | N/A | 5829 | 5848 | ATCACCGACAATTTCAATGA | 77 | 1763 |
| 1239080 | N/A | N/A | 5960 | 5979 | TAGCAAATATAACAATCTCT | 48 | 1764 |
| 1239102 | N/A | N/A | 6268 | 6287 | TTGGTGACTTTCAACCTTCC | 93 | 1765 |
| 1239124 | N/A | N/A | 6416 | 6435 | AAATCTGTGGCCATTTCTCT | 61 | 1766 |
| 1239146 | N/A | N/A | 6493 | 6512 | CTGTTATGTTATTATTGTTA | 19 | 1767 |
| 1239168 | N/A | N/A | 6675 | 6694 | ACATGTTTTGAATGTTTAAT | 76 | 1768 |
| 1239190 | N/A | N/A | 6848 | 6867 | CTCCCTTAAAGTGATCACAC | 92 | 1769 |
| 1239212 | N/A | N/A | 7143 | 7162 | GCTGAAAAAAATTTTGCACA | 86 | 1770 |
| 1239234 | N/A | N/A | 7432 | 7451 | CGTTCATCTTATTCCCATTT | 17 | 1771 |
| 1239256 | N/A | N/A | 8082 | 8101 | TGGCTAAATTTATTCTGAAA | 68 | 1772 |
| 1239278 | N/A | N/A | 8312 | 8331 | AAAGATGCCACCTTCACCCA | 89 | 1773 |
| 1239300 | N/A | N/A | 8616 | 8635 | AGATCATTTACTATGATACA | 109 | 1774 |
| 1239322 | N/A | N/A | 8975 | 8994 | CTTACACTTCACTTAGACCA | 70 | 1775 |
| 1239344 | N/A | N/A | 9351 | 9370 | GTAGTTTTTCAAATCAACAA | 54 | 1776 |
| 1239366 | N/A | N/A | 9520 | 9539 | GCCCAAGATATCATAATTTT | 74 | 1777 |
| 1239388 | N/A | N/A | 9786 | 9805 | CAGCACCCAACTTATTTTAA | 72 | 1778 |
| 1239410 | N/A | N/A | 10631 | 10650 | AAGGAGATCAAATCTGTGGA | 52 | 1779 |
| 1239432 | N/A | N/A | 10760 | 10779 | GGCACAATAATTTATTGATT | 92 | 1780 |
| 1239454 | N/A | N/A | 12311 | 12330 | TGCAGAGGAACAACACATAC | 109 | 1781 |
| 1239476 | N/A | N/A | 13492 | 13511 | GATAACATGAGAACCAACGC | 98 | 1782 |
| 1239498 | N/A | N/A | 13728 | 13747 | TTTCAAGATATCCTATTAAG | 85 | 1783 |
| 1239520 | N/A | N/A | 14118 | 14137 | CCAGCTAACATTTTCAATTC | 51 | 1784 |
| 1239542 | N/A | N/A | 14365 | 14384 | TTATTATTCATGTTCTCCAC | 79 | 1785 |
| 1239564 | N/A | N/A | 14529 | 14548 | TAGAAGGCTTTTCTTCCAGC | 60 | 1786 |
| 1239586 | N/A | N/A | 14901 | 14920 | ACATTGGATCTATCAGCAAA | 77 | 1787 |
| 1239608 | N/A | N/A | 15195 | 15214 | AGTTAAAGTACTCAGGTCAT | 66 | 1788 |
| 1239630 | N/A | N/A | 15300 | 15319 | AAATAAATTAACATCCTGTT | 97 | 1789 |
| 1239652 | N/A | N/A | 15399 | 15418 | AATTAGCTGCAAATTTTTCT | 78 | 1790 |
| 1239674 | N/A | N/A | 15445 | 15464 | TTTAGAACATTTTTGTGAAC | 82 | 1791 |
| 1239696 | N/A | N/A | 15648 | 15667 | GAAGTTAGTCTTGTCCTCAG | 31 | 1792 |
| 1239718 | N/A | N/A | 15721 | 15740 | CCCTAGGTCAAATCATAGGC | 99 | 1793 |
| 1239740 | N/A | N/A | 15810 | 15829 | ATTAAAGATCTCATTTACCC | 85 | 1794 |
| 1239762 | N/A | N/A | 15848 | 15867 | GAGAATGTACATTCATCAAA | 65 | 1795 |
| 1239784 | N/A | N/A | 15903 | 15922 | TGTACCAAAACAACAAACAG | 102 | 1796 |
| 1239806 | N/A | N/A | 16082 | 16101 | ACACTGTTGCCACCCTGTAC | 85 | 1797 |

TABLE 25
Reduction of PRNP RNA

| | SEQ ID | SEQ ID | SEQ ID | SEQ ID | | PRNP | |
|---|---|---|---|---|---|---|---|
| | NO: 1 | NO: 1 | NO: 2 | NO: 2 | | (% UTC) | SEQ |
| Compound | Start | Stop | Start | Stop | | RTS | ID |
| ID | Site | Site | Site | Site | Sequence (5′ to 3′) | 42354 | NO |
| 1201142 | 1963 | 1982 | 17754 | 17773 | GCCACATATAGGGTCCTTTA | 12 | 66 |
| 1238135 | 68 | 87 | 3161 | 3180 | GGCTCATTGACTGTAAAAAT | 120 | 1798 |
| 1238157 | 140 | 159 | 3233 | 3252 | AAAACGAGTTGAGATTCGCT | 132 | 1799 |
| 1238179 | 601 | 620 | 16392 | 16411 | CCACCACCATGAGGCTGCCC | 84 | 1800 |
| | 625 | 644 | 16416 | 16435 | | | |
| 1238201 | 701 | 720 | 16492 | 16511 | ACTGTGGGTGCCACCTCCTT | 73 | 180 |
| 1238223 | 1181 | 1200 | 16972 | 16991 | AGACCTTCCTCATCCCACTA | 107 | 1802 |
| 1238245 | 1341 | 1360 | 17132 | 17151 | TCTACTCTATGTTTTCCAGT | 27 | 1803 |
| 1238267 | 1485 | 1504 | 17276 | 17295 | TTGTTTTAGCCTCAACCTGT | 48 | 1804 |
| 1238289 | 1656 | 1675 | 17447 | 17466 | CATGTGGCCTCCTAACAAAC | 81 | 1805 |
| 1238311 | 1768 | 1787 | 17559 | 17578 | TGTGAAAAGTAAAACATCAC | 84 | 1806 |
| 1238333 | 1826 | 1845 | 17617 | 17636 | GAGGTTCAGTGTTGTGACAA | 34 | 1807 |
| 1238355 | 1870 | 1889 | 17661 | 17680 | ATATATGTTACAGTTATGTT | 82 | 1808 |
| 1238377 | 1906 | 1925 | 17697 | 17716 | TCCCAAACATTTGATTTCAA | 83 | 1809 |
| 1238399 | 1981 | 2000 | 17772 | 17791 | TAGTTTAAAGAAAGGAATGC | 129 | 1810 |
| 1238421 | 2023 | 2042 | 17814 | 17833 | TGTCTAGAAGGCAATTTACT | 120 | 1811 |
| 1238443 | 2078 | 2097 | 17869 | 17888 | TATGTCAAAATCATTCTGGT | 22 | 1812 |
| 1238465 | 2112 | 2131 | 17903 | 17922 | TGATGATGGTGCTTTCACAA | 25 | 1813 |
| 1238487 | 2142 | 2161 | 17933 | 17952 | CTGACCATTTTTTAATTACA | 36 | 1814 |
| 1238509 | 2168 | 2187 | 17959 | 17978 | ATGCAAGCAGTTCTTTTCTT | 22 | 1815 |
| 1238531 | 2228 | 2247 | 18019 | 18038 | CAGAAACTATGAACTTGACC | 34 | 1816 |
| 1238553 | 2263 | 2282 | 18054 | 18073 | ATTGTCTCCCTATTCTTTGA | 44 | 1817 |
| 1238575 | 2296 | 2315 | 18087 | 18106 | TTTCTGTCATCTCCAACCTA | 61 | 1818 |
| 1238597 | 2319 | 2338 | 18110 | 18129 | TTTTCCACTTCAAATCAATC | 61 | 1819 |
| 1238619 | 2363 | 2382 | 18154 | 18173 | ATTCAGGGAATAATTTTACT | 75 | 1820 |
| 1238641 | 2401 | 2420 | 18192 | 18211 | AAAAGTAATACATATCTGCT | 72 | 1821 |
| 1238663 | 2507 | 2526 | 18298 | 18317 | GCTCTAAACAAAACTCCTAA | 61 | 1822 |
| 1238685 | 2559 | 2578 | 18350 | 18369 | AGTATTCAGTACCTTACAAA | 48 | 1823 |
| 1238707 | 2704 | 2723 | 18495 | 18514 | ACATGCAAAGTTACAAATAT | 82 | 1824 |
| 1238729 | N/A | N/A | 4712 | 4731 | TGAAGATCCTCATCATTACA | 102 | 1825 |
| 1238751 | N/A | N/A | 4810 | 4829 | CCAGGAGTTTTCCCTAAGGA | 66 | 1826 |
| 1238773 | N/A | N/A | 4849 | 4868 | TTGATAATTATATTTGTAAA | 114 | 1827 |
| 1238795 | N/A | N/A | 4890 | 4909 | AGAAGTTTAACATATTTATC | 103 | 1828 |
| 1238817 | N/A | N/A | 4946 | 4965 | TCCACTGGTGATTTTTTCCT | 50 | 1829 |
| 1238839 | N/A | N/A | 5007 | 5026 | CTGGTTAGCTTTTTTTCACT | 17 | 1830 |
| 1238861 | N/A | N/A | 5065 | 5084 | TGTTAGATATAAATAACATA | 100 | 1831 |
| 1238883 | N/A | N/A | 5117 | 5136 | TGCCATTTATCTATTATAAT | 88 | 1832 |
| 1238905 | N/A | N/A | 5162 | 5181 | AACATGCTCTAATTTGCATT | 107 | 1833 |
| 1238927 | N/A | N/A | 5301 | 5320 | CAGAACCATCTTTGTGACCC | 72 | 1834 |
| 1238949 | N/A | N/A | 5410 | 5429 | AACTCATACATACAGACGCA | 37 | 1835 |
| 1238971 | N/A | N/A | 5481 | 5500 | GCTTCCAGCTTCTTAATGCA | 78 | 1836 |
| 1238993 | N/A | N/A | 5634 | 5653 | TAATTTTCTTAGCTACTGCC | 60 | 1837 |
| 1239015 | N/A | N/A | 5682 | 5701 | ATCATGATTTTTAGTGGTTA | 26 | 1838 |
| 1239037 | N/A | N/A | 5733 | 5752 | TAACCCACTTTTTTACTTGT | 97 | 1839 |
| 1239059 | N/A | N/A | 5831 | 5850 | AGATCACCGACAATTTCAAT | 53 | 1840 |
| 1239081 | N/A | N/A | 5961 | 5980 | GTAGCAAATATAACAATCTC | 43 | 1841 |
| 1239103 | N/A | N/A | 6271 | 6290 | CATTTGGTGACTTTCAACCT | 65 | 1842 |
| 1239125 | N/A | N/A | 6423 | 6442 | ATTCTAAAAATCTGTGGCCA | 92 | 1843 |
| 1239147 | N/A | N/A | 6494 | 6513 | TCTGTTATGTTATTATTGTT | 38 | 1844 |
| 1239169 | N/A | N/A | 6683 | 6702 | AGATACAGACATGTTTTGAA | 30 | 1845 |
| 1239191 | N/A | N/A | 6854 | 6873 | GATTACCTCCCTTAAAGTGA | 78 | 1846 |
| 1239213 | N/A | N/A | 7186 | 7205 | GTTATATTTTAATTTTCTGA | 42 | 1847 |
| 1239235 | N/A | N/A | 7433 | 7452 | CCGTTCATCTTATTCCCATT | 28 | 1848 |
| 1239257 | N/A | N/A | 8085 | 8104 | TCTTGGCTAAATTTATTCTG | 37 | 1849 |
| 1239279 | N/A | N/A | 8313 | 8332 | CAAAGATGCCACCTTCACCC | 98 | 1850 |
| 1239301 | N/A | N/A | 8618 | 8637 | AAAGATCATTTACTATGATA | 115 | 1851 |
| 1239323 | N/A | N/A | 8976 | 8995 | ACTTACACTTCACTTAGACC | 64 | 1852 |
| 1239345 | N/A | N/A | 9353 | 9372 | TGGTAGTTTTTCAAATCAAC | 12 | 1853 |
| 1239367 | N/A | N/A | 9526 | 9545 | CACAAAGCCCAAGATATCAT | 81 | 1854 |
| 1239389 | N/A | N/A | 9846 | 9865 | CACACTTAGCCACCCTGCCA | 130 | 1855 |
| 1239411 | N/A | N/A | 10656 | 10675 | TAGCTTGGTGGGCTTAAGGA | 86 | 1856 |
| 1239433 | N/A | N/A | 10761 | 10780 | TGGCACAATAATTTATTGAT | 97 | 1857 |
| 1239455 | N/A | N/A | 12370 | 12389 | CCAATTCTACATGTTCTCAT | 60 | 1858 |
| 1239477 | N/A | N/A | 13521 | 13540 | GCACATAGAAAATCCAACAG | 61 | 1859 |
| 1239499 | N/A | N/A | 13734 | 13753 | GGCATATTTCAAGATATCCT | 34 | 1860 |
| 1239521 | N/A | N/A | 14119 | 14138 | GCCAGCTAACATTTTCAATT | 43 | 1861 |
| 1239543 | N/A | N/A | 14366 | 14385 | CTTATTATTCATGTTCTCCA | 46 | 1862 |
| 1239565 | N/A | N/A | 14531 | 14550 | CCTAGAAGGCTTTTCTTCCA | 80 | 1863 |
| 1239587 | N/A | N/A | 14902 | 14921 | TACATTGGATCTATCAGCAA | 68 | 1864 |
| 1239609 | N/A | N/A | 15197 | 15216 | AGAGTTAAAGTACTCAGGTC | 65 | 1865 |
| 1239631 | N/A | N/A | 15303 | 15322 | AATAAATAAATTAACATCCT | 109 | 1866 |
| 1239653 | N/A | N/A | 15409 | 15428 | TTTATCACCCAATTAGCTGC | 76 | 1867 |
| 1239675 | N/A | N/A | 15456 | 15475 | CTGTTGCCAATTTTAGAACA | 118 | 1868 |
| 1239697 | N/A | N/A | 15658 | 15677 | CTGGAACACTGAAGTTAGTC | 68 | 1869 |
| 1239719 | N/A | N/A | 15729 | 15748 | CTGCTGTACCCTAGGTCAAA | 66 | 1870 |
| 1239741 | N/A | N/A | 15816 | 15835 | TTTCAAATTAAAGATCTCAT | 103 | 1871 |
| 1239763 | N/A | N/A | 15849 | 15868 | GGAGAATGTACATTCATCAA | 82 | 1872 |
| 1239785 | N/A | N/A | 15904 | 15923 | TTGTACCAAAACAACAAACA | 105 | 1873 |
| 1239807 | N/A | N/A | 16094 | 16113 | TGCTCAGTAGAAACACTGTT | 85 | 1874 |

TABLE 26
Reduction of PRNP RNA

| | SEQ ID | SEQ ID | SEQ ID | SEQ ID | | PRNP | |
|---|---|---|---|---|---|---|---|
| | NO: 1 | NO: 1 | NO: 2 | NO: 2 | | (% UTC) | SEQ |
| Compound | Start | Stop | Start | Stop | | RTS | ID |
| ID | Site | Site | Site | Site | Sequence (5′ to 3′) | 42354 | NO |
| 1201142 | 1963 | 1982 | 17754 | 17773 | GCCACATATAGGGTCCTTTA | 11 | 66 |
| 1238136 | 69 | 88 | 3162 | 3181 | TGGCTCATTGACTGTAAAAA | 111 | 1875 |
| 1238158 | 142 | 161 | 3235 | 3254 | AAAAAACGAGTTGAGATTCG | 105 | 1876 |
| 1238180 | 602 | 621 | 16393 | 16412 | GCCACCACCATGAGGCTGCC | 102 | 1877 |
| | 626 | 645 | 16417 | 16436 | | | |
| 1238202 | 722 | 741 | 16513 | 16532 | CTTACTCGGCTTGTTCCACT | 87 | 1878 |
| 1238224 | 1182 | 1201 | 16973 | 16992 | AAGACCTTCCTCATCCCACT | 87 | 1879 |
| 1238246 | 1345 | 1364 | 17136 | 17155 | CAGGTCTACTCTATGTTTTC | 24 | 1880 |
| 1238268 | 1490 | 1509 | 17281 | 17300 | GAGATTTGTTTTAGCCTCAA | 27 | 1881 |
| 1238290 | 1657 | 1676 | 17448 | 17467 | TCATGTGGCCTCCTAACAAA | 29 | 1882 |
| 1238312 | 1769 | 1788 | 17560 | 17579 | CTGTGAAAAGTAAAACATCA | 53 | 1883 |
| 1238334 | 1829 | 1848 | 17620 | 17639 | CCAGAGGTTCAGTGTTGTGA | 13 | 1884 |
| 1238356 | 1873 | 1892 | 17664 | 17683 | TTCATATATGTTACAGTTAT | 26 | 1885 |
| 1238378 | 1909 | 1928 | 17700 | 17719 | CATTCCCAAACATTTGATTT | 82 | 1886 |
| 1238400 | 1985 | 2004 | 17776 | 17795 | CCTATAGTTTAAAGAAAGGA | 96 | 1887 |
| 1238422 | 2024 | 2043 | 17815 | 17834 | GTGTCTAGAAGGCAATTTAC | 70 | 1888 |
| 1238444 | 2079 | 2098 | 17870 | 17889 | GTATGTCAAAATCATTCTGG | 16 | 1889 |
| 1238466 | 2113 | 2132 | 17904 | 17923 | ATGATGATGGTGCTTTCACA | 19 | 1890 |
| 1238488 | 2143 | 2162 | 17934 | 17953 | ACTGACCATTTTTTAATTAC | 32 | 1891 |
| 1238510 | 2172 | 2191 | 17963 | 17982 | AGAAATGCAAGCAGTTCTTT | 40 | 1892 |
| 1238532 | 2230 | 2249 | 18021 | 18040 | TACAGAAACTATGAACTTGA | 36 | 1893 |
| 1238554 | 2264 | 2283 | 18055 | 18074 | GATTGTCTCCCTATTCTTTG | 22 | 1894 |
| 1238576 | 2297 | 2316 | 18088 | 18107 | ATTTCTGTCATCTCCAACCT | 34 | 1895 |
| 1238598 | 2321 | 2340 | 18112 | 18131 | CTTTTTCCACTTCAAATCAA | 48 | 1896 |
| 1238620 | 2364 | 2383 | 18155 | 18174 | AATTCAGGGAATAATTTTAC | 79 | 1897 |
| 1238642 | 2402 | 2421 | 18193 | 18212 | GAAAAGTAATACATATCTGC | 72 | 1898 |
| 1238664 | 2509 | 2528 | 18300 | 18319 | CTGCTCTAAACAAAACTCCT | 61 | 1899 |
| 1238686 | 2560 | 2579 | 18351 | 18370 | AAGTATTCAGTACCTTACAA | 44 | 1900 |
| 1238708 | 2708 | 2727 | 18499 | 18518 | AAGAACATGCAAAGTTACAA | 82 | 1901 |
| 1238730 | N/A | N/A | 4713 | 4732 | ATGAAGATCCTCATCATTAC | 82 | 1902 |
| 1238752 | N/A | N/A | 4812 | 4831 | TACCAGGAGTTTTCCCTAAG | 73 | 1903 |
| 1238774 | N/A | N/A | 4850 | 4869 | TTTGATAATTATATTTGTAA | 123 | 1904 |
| 1238796 | N/A | N/A | 4891 | 4910 | CAGAAGTTTAACATATTTAT | 74 | 1905 |
| 1238818 | N/A | N/A | 4956 | 4975 | ATTGCTCCTTTCCACTGGTG | 32 | 1906 |
| 1238840 | N/A | N/A | 5008 | 5027 | ACTGGTTAGCTTTTTTTCAC | 29 | 1907 |
| 1238862 | N/A | N/A | 5066 | 5085 | GTGTTAGATATAAATAACAT | 94 | 1908 |
| 1238884 | N/A | N/A | 5118 | 5137 | TTGCCATTTATCTATTATAA | 47 | 1909 |
| 1238906 | N/A | N/A | 5163 | 5182 | AAACATGCTCTAATTTGCAT | 79 | 1910 |
| 1238928 | N/A | N/A | 5302 | 5321 | GCAGAACCATCTTTGTGACC | 51 | 1911 |
| 1238950 | N/A | N/A | 5413 | 5432 | AATAACTCATACATACAGAC | 60 | 1912 |
| 1238972 | N/A | N/A | 5490 | 5509 | TGGGTCACAGCTTCCAGCTT | 60 | 1913 |
| 1238994 | N/A | N/A | 5638 | 5657 | GTCATAATTTTCTTAGCTAC | 12 | 1914 |
| 1239016 | N/A | N/A | 5684 | 5703 | AAATCATGATTTTTAGTGGT | 55 | 1915 |
| 1239038 | N/A | N/A | 5735 | 5754 | AATAACCCACTTTTTTACTT | 80 | 1916 |
| 1239060 | N/A | N/A | 5839 | 5858 | GAAAATTAAGATCACCGACA | 26 | 1917 |
| 1239082 | N/A | N/A | 5974 | 5993 | TCTTTTATTCTAAGTAGCAA | 72 | 1918 |
| 1239104 | N/A | N/A | 6288 | 6307 | ACCCTCATTTTCTGTGACAT | 61 | 1919 |
| 1239126 | N/A | N/A | 6424 | 6443 | AATTCTAAAAATCTGTGGCC | 84 | 1920 |
| 1239148 | N/A | N/A | 6499 | 6518 | AAACTTCTGTTATGTTATTA | 75 | 1921 |
| 1239170 | N/A | N/A | 6684 | 6703 | TAGATACAGACATGTTTTGA | 58 | 1922 |
| 1239192 | N/A | N/A | 6855 | 6874 | GGATTACCTCCCTTAAAGTG | 62 | 1923 |
| 1239214 | N/A | N/A | 7189 | 7208 | CTTGTTATATTTTAATTTTC | 113 | 1924 |
| 1239236 | N/A | N/A | 7588 | 7607 | GAAGAAAATTTTTAATGAGA | 114 | 1925 |
| 1239258 | N/A | N/A | 8159 | 8178 | TATCTTTCTATTTGTGTCTC | 39 | 1926 |
| 1239280 | N/A | N/A | 8314 | 8333 | ACAAAGATGCCACCTTCACC | 82 | 1927 |
| 1239302 | N/A | N/A | 8639 | 8658 | GCAAATTCAACAGCTCATTA | 39 | 1928 |
| 1239324 | N/A | N/A | 8981 | 9000 | ATCAGACTTACACTTCACTT | 55 | 1929 |
| 1239346 | N/A | N/A | 9354 | 9373 | GTGGTAGTTTTTCAAATCAA | 12 | 1930 |
| 1239368 | N/A | N/A | 9536 | 9555 | CTGTCACAAACACAAAGCCC | 79 | 1931 |
| 1239390 | N/A | N/A | 9847 | 9866 | GCACACTTAGCCACCCTGCC | 112 | 1932 |
| 1239412 | N/A | N/A | 10675 | 10694 | CAGTTTTGAATAAGATACTT | 77 | 1933 |
| 1239434 | N/A | N/A | 10780 | 10799 | ATTATTGTGCCACCAAGCCT | 129 | 1934 |
| 1239456 | N/A | N/A | 12378 | 12397 | CAGAAAACCCAATTCTACAT | 107 | 1935 |
| 1239478 | N/A | N/A | 13522 | 13541 | TGCACATAGAAAATCCAACA | 70 | 1936 |
| 1239500 | N/A | N/A | 13735 | 13754 | TGGCATATTTCAAGATATCC | 44 | 1937 |
| 1239522 | N/A | N/A | 14135 | 14154 | AGTATTTTTGACAATGGCCA | 61 | 1938 |
| 1239544 | N/A | N/A | 14367 | 14386 | GCTTATTATTCATGTTCTCC | 13 | 1939 |
| 1239566 | N/A | N/A | 14579 | 14598 | TGACAAGCCCATCCTGTCTC | 102 | 1940 |
| 1239588 | N/A | N/A | 14918 | 14937 | ATTTTCTCTCCCAGCATACA | 109 | 1941 |
| 1239610 | N/A | N/A | 15203 | 15222 | ACAAGCAGAGTTAAAGTACT | 77 | 1942 |
| 1239632 | N/A | N/A | 15332 | 15351 | CTGGATAATATTCATAAAAA | 95 | 1943 |
| 1239654 | N/A | N/A | 15410 | 15429 | CTTTATCACCCAATTAGCTG | 73 | 1944 |
| 1239676 | N/A | N/A | 15458 | 15477 | AACTGTTGCCAATTTTAGAA | 86 | 1945 |
| 1239698 | N/A | N/A | 15663 | 15682 | ATATACTGGAACACTGAAGT | 61 | 1946 |
| 1239720 | N/A | N/A | 15732 | 15751 | TACCTGCTGTACCCTAGGTC | 86 | 1947 |
| 1239742 | N/A | N/A | 15819 | 15838 | TCTTTTCAAATTAAAGATCT | 105 | 1948 |
| 1239764 | N/A | N/A | 15850 | 15869 | TGGAGAATGTACATTCATCA | 33 | 1949 |
| 1239786 | N/A | N/A | 15911 | 15930 | CTAATTTTTGTACCAAAACA | 106 | 1950 |
| 1239808 | N/A | N/A | 16116 | 16135 | AGTGCATAGCAATGGTATCA | 34 | 1951 |

TABLE 27
Reduction of PRNP RNA

| | SEQ ID | SEQ ID | SEQ ID | SEQ ID | | PRNP | |
|---|---|---|---|---|---|---|---|
| | NO: 1 | NO: 1 | NO: 2 | NO: 2 | | (% UTC) | SEQ |
| Compound | Start | Stop | Start | Stop | | RTS | ID |
| ID | Site | Site | Site | Site | Sequence (5′ to 3′) | 42354 | NO |
| 1201142 | 1963 | 1982 | 17754 | 17773 | GCCACATATAGGGTCCTTTA | 8 | 66 |
| 1238119 | 48 | 67 | 3141 | 3160 | CATCTTTAATTGGAAATTCG | 98 | 1952 |
| 1238141 | 109 | 128 | 3202 | 3221 | ATCAGTTGATACCGCCTGCG | 120 | 1953 |
| 1238163 | 457 | 476 | 16248 | 16267 | CATGTGGCCACAAAGAGAAC | 54* | 1954 |
| 1238185 | 590 | 609 | 16381 | 16400 | AGGCTGCCCCCAGCCACCAC | 98 | 1955 |
| | 614 | 633 | 16405 | 16424 | | | |
| 1238207 | 789 | 808 | 16580 | 16599 | CGCCAAGGCCCCCCACCACT | 64 | 1956 |
| 1238229 | 1187 | 1206 | 16978 | 16997 | ACAGGAAGACCTTCCTCATC | 86 | 1957 |
| 1238251 | 1385 | 1404 | 17176 | 17195 | CTCATGATGAACTCAATCAA | 58 | 1958 |
| 1238273 | 1585 | 1604 | 17376 | 17395 | CTATGAAATCTCTACTAAGA | 66 | 1959 |
| 1238295 | 1666 | 1685 | 17457 | 17476 | GAATAAGTATCATGTGGCCT | 35 | 1960 |
| 1238317 | 1807 | 1826 | 17598 | 17617 | ATATTTACTCTTGTTGAACA | 55 | 1961 |
| 1238339 | 1851 | 1870 | 17642 | 17661 | TCACTGTGAATATGTCCTCT | 9 | 1962 |
| 1238361 | 1879 | 1898 | 17670 | 17689 | AAGCCTTTCATATATGTTAC | 18 | 1963 |
| 1238383 | 1917 | 1936 | 17708 | 17727 | AAGGGCACCATTCCCAAACA | 106 | 1964 |
| 1238405 | 2000 | 2019 | 17791 | 17810 | CAGCTGCCTTAATTACCTAT | 20 | 1965 |
| 1238427 | 2039 | 2058 | 17830 | 17849 | GGAGATTTGCCTTCAGTGTC | 29 | 1966 |
| 1238449 | 2088 | 2107 | 17879 | 17898 | AGCTCTCCTGTATGTCAAAA | 17 | 1967 |
| 1238471 | 2123 | 2142 | 17914 | 17933 | ATCATCCTCTATGATGATGG | 101 | 1968 |
| 1238493 | 2152 | 2171 | 17943 | 17962 | TCTTTGCACACTGACCATTT | 15 | 1969 |
| 1238515 | 2199 | 2218 | 17990 | 18009 | TTTTTGACAATTATGAGACA | 54 | 1970 |
| 1238537 | 2242 | 2261 | 18033 | 18052 | TCAAAAGCCAATTACAGAAA | 78 | 1971 |
| 1238559 | 2272 | 2291 | 18063 | 18082 | ATTTTTTAGATTGTCTCCCT | 43 | 1972 |
| 1238581 | 2302 | 2321 | 18093 | 18112 | ATCATATTTCTGTCATCTCC | 23 | 1973 |
| 1238603 | 2331 | 2350 | 18122 | 18141 | AACAGAATTTCTTTTTCCAC | 43 | 1974 |
| 1238625 | 2377 | 2396 | 18168 | 18187 | GACAATATCAAACAATTCAG | 22 | 1975 |
| 1238647 | 2425 | 2444 | 18216 | 18235 | TGCAAGCCAATAATAACATT | 25 | 1976 |
| 1238669 | 2521 | 2540 | 18312 | 18331 | TTCAGATGTTAACTGCTCTA | 35 | 1977 |
| 1238691 | 2579 | 2598 | 18370 | 18389 | AAAGGGTTTCCCACATATTA | 49 | 1978 |
| 1238713 | 2722 | 2741 | 18513 | 18532 | TTATATAACAAAACAAGAAC | 88 | 1979 |
| 1238735 | N/A | N/A | 4743 | 4762 | ATGCTCTCAGAACAAGAAAA | 53 | 1980 |
| 1238757 | N/A | N/A | 4824 | 4843 | TTAATCCTATTCTACCAGGA | 78 | 1981 |
| 1238779 | N/A | N/A | 4871 | 4890 | CCAATTCCCTGTTCCTATGT | 42 | 1982 |
| 1238801 | N/A | N/A | 4901 | 4920 | TTGATTTTTCCAGAAGTTTA | 36 | 1983 |
| 1238823 | N/A | N/A | 4963 | 4982 | AAGTAAAATTGCTCCTTTCC | 58 | 1984 |
| 1238845 | N/A | N/A | 5040 | 5059 | CACATCCTACCCCTCTGCCT | 95 | 1985 |
| 1238867 | N/A | N/A | 5096 | 5115 | TTAATATTTTCCTTTCGGTG | 33 | 1986 |
| 1238889 | N/A | N/A | 5124 | 5143 | ATCATTTTGCCATTTATCTA | 24 | 1987 |
| 1238911 | N/A | N/A | 5179 | 5198 | TGTAAAATGATAACCCAAAC | 63 | 1988 |
| 1238933 | N/A | N/A | 5324 | 5343 | GTCCAAGGTCACAAAATTGA | 74 | 1989 |
| 1238955 | N/A | N/A | 5425 | 5444 | CGAAATGCCCCCAATAACTC | 51 | 1990 |
| 1238977 | N/A | N/A | 5572 | 5591 | TAGATCATTCTGCTAGGAAT | 35 | 1991 |
| 1238999 | N/A | N/A | 5644 | 5663 | TAATGTGTCATAATTTTCTT | 64 | 1992 |
| 1239021 | N/A | N/A | 5703 | 5722 | CCACATATCACAGGCTCCAA | 31 | 1993 |
| 1239043 | N/A | N/A | 5742 | 5761 | TGCAGTTAATAACCCACTTT | 44 | 1994 |
| 1239065 | N/A | N/A | 5861 | 5880 | GAGAGCAATATATTCACCAA | 20 | 1995 |
| 1239087 | N/A | N/A | 6040 | 6059 | ACTAAATCATTAATCAACTA | 91 | 1996 |
| 1239109 | N/A | N/A | 6306 | 6325 | TGATCACAGCCTTTCCTGAC | 69 | 1997 |
| 1239131 | N/A | N/A | 6431 | 6450 | TCAGCATAATTCTAAAAATC | 95 | 1998 |
| 1239153 | N/A | N/A | 6507 | 6526 | TGGTGCAGAAACTTCTGTTA | 69 | 1999 |
| 1239175 | N/A | N/A | 6713 | 6732 | ATTTTATAATGCTGTAGCCA | 40 | 2000 |
| 1239197 | N/A | N/A | 6861 | 6880 | ACTGAAGGATTACCTCCCTT | 64 | 2001 |
| 1239219 | N/A | N/A | 7227 | 7246 | CATAATGTCCCTTGTCTCTT | 56 | 2002 |
| 1239241 | N/A | N/A | 7709 | 7728 | TCTAATTTTGTACACAATAC | 61 | 2003 |
| 1239263 | N/A | N/A | 8168 | 8187 | AGCACAGGCTATCTTTCTAT | 29 | 2004 |
| 1239285 | N/A | N/A | 8347 | 8366 | ATTGAGAGCTTTTCCTCTTA | 106 | 2005 |
| 1239307 | N/A | N/A | 8655 | 8674 | ACAAAATTCTAGCGAAGCAA | 75 | 2006 |
| 1239329 | N/A | N/A | 9039 | 9058 | GCTTTGGATCTCTTAGATTT | 14 | 2007 |
| 1239351 | N/A | N/A | 9417 | 9436 | TATAATTTTTTTACCTGGAA | 58 | 2008 |
| 1239373 | N/A | N/A | 9636 | 9655 | ATGAAAATCAATATCATTCC | 80 | 2009 |
| 1239395 | N/A | N/A | 10022 | 10041 | TAGACATGTAAACTTTGCCA | 37 | 2010 |
| 1239417 | N/A | N/A | 10722 | 10741 | AGTGTCAGAATTCTAAGGGT | 36 | 2011 |
| 1239439 | N/A | N/A | 10797 | 10816 | TAGGTGACCCACAACACATT | 96 | 2012 |
| 1239461 | N/A | N/A | 12469 | 12488 | AGTGTGGTACATATATGCTA | 50 | 2013 |
| 1239483 | N/A | N/A | 13544 | 13563 | CTATTTGCAATTAGTGTGAT | 84 | 2014 |
| 1239505 | N/A | N/A | 13778 | 13797 | CTAAGATACTCTCTGTCACC | 63 | 2015 |
| 1239527 | N/A | N/A | 14191 | 14210 | TACTAAATATTTATAATGGA | 103 | 2016 |
| 1239549 | N/A | N/A | 14372 | 14391 | TCTGTGCTTATTATTCATGT | 51 | 2017 |
| 1239571 | N/A | N/A | 14799 | 14818 | CCATCACTTCTCACCTGATT | 73 | 2018 |
| 1239593 | N/A | N/A | 14927 | 14946 | AGTGACTGAATTTTCTCTCC | 66 | 2019 |
| 1239615 | N/A | N/A | 15238 | 15257 | GTGGTCATAAGCAAATCAAA | 44 | 2020 |
| 1239637 | N/A | N/A | 15362 | 15381 | TTTTCATCTCCTTCAGAGCT | 60 | 2021 |
| 1239659 | N/A | N/A | 15417 | 15436 | CCCTTACCTTTATCACCCAA | 76 | 2022 |
| 1239681 | N/A | N/A | 15508 | 15527 | CCATGTACAGTTCAATGGTT | 102 | 2023 |
| 1239703 | N/A | N/A | 15683 | 15702 | GCCGTAAAACCTATAATGGC | 87 | 2024 |
| 1239725 | N/A | N/A | 15748 | 15767 | AATGATTGCTAAACAGTACC | 75 | 2025 |
| 1239747 | N/A | N/A | 15830 | 15849 | AATCAAAAATCTCTTTTCAA | 97 | 2026 |
| 1239769 | N/A | N/A | 15874 | 15893 | CCAGAATGACAATTTATGAC | 34 | 2027 |
| 1239791 | N/A | N/A | 15926 | 15945 | GTGAATTATTTTCTTCTAAT | 35 | 2028 |

TABLE 28
Reduction of PRNP RNA

| | SEQ ID | SEQ ID | SEQ ID | SEQ ID | | PRNP | |
|---|---|---|---|---|---|---|---|
| | NO: 1 | NO: 1 | NO: 2 | NO: 2 | | (% UTC) | SEQ |
| Compound | Start | Stop | Start | Stop | | RTS | ID |
| ID | Site | Site | Site | Site | Sequence (5′ to 3′) | 42354 | NO |
| 1201142 | 1963 | 1982 | 17754 | 17773 | GCCACATATAGGGTCCTTTA | 11 | 66 |
| 1238120 | 49 | 68 | 3142 | 3161 | TCATCTTTAATTGGAAATTC | 95 | 2029 |
| 1238142 | 113 | 132 | 3206 | 3225 | TTGCATCAGTTGATACCGCC | 121 | 2030 |
| 1238164 | 458 | 477 | 16249 | 16268 | CCATGTGGCCACAAAGAGAA | 32* | 2031 |
| 1238186 | 591 | 610 | 16382 | 16401 | GAGGCTGCCCCCAGCCACCA | 79 | 2032 |
| | 615 | 634 | 16406 | 16425 | | | |
| 1238208 | 856 | 875 | 16647 | 16666 | TAACGGTCCTCATAGTCACT | 63 | 2033 |
| 1238230 | 1189 | 1208 | 16980 | 16999 | AAACAGGAAGACCTTCCTCA | 82 | 2034 |
| 1238252 | 1397 | 1416 | 17188 | 17207 | CATTAGCAACGGCTCATGAT | 75 | 2035 |
| 1238274 | 1586 | 1605 | 17377 | 17396 | GCTATGAAATCTCTACTAAG | 15 | 2036 |
| 1238296 | 1676 | 1695 | 17467 | 17486 | GGATTTTTTTGAATAAGTAT | 31 | 2037 |
| 1238318 | 1808 | 1827 | 17599 | 17618 | AATATTTACTCTTGTTGAAC | 72 | 2038 |
| 1238340 | 1852 | 1871 | 17643 | 17662 | TTCACTGTGAATATGTCCTC | 20 | 2039 |
| 1238362 | 1881 | 1900 | 17672 | 17691 | AGAAGCCTTTCATATATGTT | 26 | 2040 |
| 1238384 | 1918 | 1937 | 17709 | 17728 | CAAGGGCACCATTCCCAAAC | 102 | 2041 |
| 1238406 | 2001 | 2020 | 17792 | 17811 | TCAGCTGCCTTAATTACCTA | 25 | 2042 |
| 1238428 | 2040 | 2059 | 17831 | 17850 | AGGAGATTTGCCTTCAGTGT | 35 | 2043 |
| 1238450 | 2090 | 2109 | 17881 | 17900 | GCAGCTCTCCTGTATGTCAA | 28 | 2044 |
| 1238472 | 2124 | 2143 | 17915 | 17934 | CATCATCCTCTATGATGATG | 104 | 2045 |
| 1238494 | 2153 | 2172 | 17944 | 17963 | TTCTTTGCACACTGACCATT | 31 | 2046 |
| 1238516 | 2200 | 2219 | 17991 | 18010 | GTTTTTGACAATTATGAGAC | 16 | 2047 |
| 1238538 | 2243 | 2262 | 18034 | 18053 | TTCAAAAGCCAATTACAGAA | 58 | 2048 |
| 1238560 | 2273 | 2292 | 18064 | 18083 | TATTTTTTAGATTGTCTCCC | 44 | 2049 |
| 1238582 | 2303 | 2322 | 18094 | 18113 | AATCATATTTCTGTCATCTC | 20 | 2050 |
| 1238604 | 2332 | 2351 | 18123 | 18142 | TAACAGAATTTCTTTTTCCA | 32 | 2051 |
| 1238626 | 2378 | 2397 | 18169 | 18188 | TGACAATATCAAACAATTCA | 48 | 2052 |
| 1238648 | 2427 | 2446 | 18218 | 18237 | AGTGCAAGCCAATAATAACA | 34 | 2053 |
| 1238670 | 2523 | 2542 | 18314 | 18333 | ACTTCAGATGTTAACTGCTC | 21 | 2054 |
| 1238692 | 2602 | 2621 | 18393 | 18412 | ATTGTAAGCCTAAGGACCAC | 49 | 2055 |
| 1238714 | 2723 | 2742 | 18514 | 18533 | TTTATATAACAAAACAAGAA | 89 | 2056 |
| 1238736 | N/A | N/A | 4744 | 4763 | GATGCTCTCAGAACAAGAAA | 49 | 2057 |
| 1238758 | N/A | N/A | 4826 | 4845 | CCTTAATCCTATTCTACCAG | 78 | 2058 |
| 1238780 | N/A | N/A | 4874 | 4893 | TATCCAATTCCCTGTTCCTA | 48 | 2059 |
| 1238802 | N/A | N/A | 4902 | 4921 | GTTGATTTTTCCAGAAGTTT | 9 | 2060 |
| 1238824 | N/A | N/A | 4964 | 4983 | TAAGTAAAATTGCTCCTTTC | 76 | 2061 |
| 1238846 | N/A | N/A | 5042 | 5061 | ATCACATCCTACCCCTCTGC | 77 | 2062 |
| 1238868 | N/A | N/A | 5097 | 5116 | CTTAATATTTTCCTTTCGGT | 37 | 2063 |
| 1238890 | N/A | N/A | 5125 | 5144 | CATCATTTTGCCATTTATCT | 30 | 2064 |
| 1238912 | N/A | N/A | 5183 | 5202 | TAGATGTAAAATGATAACCC | 43 | 2065 |
| 1238934 | N/A | N/A | 5345 | 5364 | GATCAGGAAATTAGGTAGCC | 39 | 2066 |
| 1238956 | N/A | N/A | 5426 | 5445 | TCGAAATGCCCCCAATAACT | 59 | 2067 |
| 1238978 | N/A | N/A | 5577 | 5596 | AATTTTAGATCATTCTGCTA | 82 | 2068 |
| 1239000 | N/A | N/A | 5650 | 5669 | TTCAGTTAATGTGTCATAAT | 22 | 2069 |
| 1239022 | N/A | N/A | 5704 | 5723 | CCCACATATCACAGGCTCCA | 59 | 2070 |
| 1239044 | N/A | N/A | 5746 | 5765 | CAGGTGCAGTTAATAACCCA | 70 | 2071 |
| 1239066 | N/A | N/A | 5862 | 5881 | TGAGAGCAATATATTCACCA | 15 | 2072 |
| 1239088 | N/A | N/A | 6041 | 6060 | TACTAAATCATTAATCAACT | 117 | 2073 |
| 1239110 | N/A | N/A | 6307 | 6326 | GTGATCACAGCCTTTCCTGA | 83 | 2074 |
| 1239132 | N/A | N/A | 6432 | 6451 | TTCAGCATAATTCTAAAAAT | 102 | 2075 |
| 1239154 | N/A | N/A | 6508 | 6527 | GTGGTGCAGAAACTTCTGTT | 64 | 2076 |
| 1239176 | N/A | N/A | 6721 | 6740 | TAGGAGTTATTTTATAATGC | 39 | 2077 |
| 1239198 | N/A | N/A | 6872 | 6891 | TAATGCTTTTCACTGAAGGA | 57 | 2078 |
| 1239220 | N/A | N/A | 7254 | 7273 | ATGTCAAACAACCCCCGACC | 108 | 2079 |
| 1239242 | N/A | N/A | 7714 | 7733 | CTCTTTCTAATTTTGTACAC | 101 | 2080 |
| 1239264 | N/A | N/A | 8182 | 8201 | ATTATCCCCCCATGAGCACA | 58 | 2081 |
| 1239286 | N/A | N/A | 8348 | 8367 | AATTGAGAGCTTTTCCTCTT | 99 | 2082 |
| 1239308 | N/A | N/A | 8660 | 8679 | TCTTAACAAAATTCTAGCGA | 107 | 2083 |
| 1239330 | N/A | N/A | 9064 | 9083 | AAGGTAATTTTATAACCCCC | 69 | 2084 |
| 1239352 | N/A | N/A | 9418 | 9437 | GTATAATTTTTTTACCTGGA | 8 | 2085 |
| 1239374 | N/A | N/A | 9640 | 9659 | TTCAATGAAAATCAATATCA | 101 | 2086 |
| 1239396 | N/A | N/A | 10037 | 10056 | CCAAGAGTTTCAGTATAGAC | 16 | 2087 |
| 1239418 | N/A | N/A | 10734 | 10753 | ACACACATTTCAAGTGTCAG | 54 | 2088 |
| 1239440 | N/A | N/A | 10811 | 10830 | GCCACAGCTATATATAGGTG | 104 | 2089 |
| 1239462 | N/A | N/A | 12545 | 12564 | TCATTGCAAAACTATCCACA | 77 | 2090 |
| 1239484 | N/A | N/A | 13546 | 13565 | CACTATTTGCAATTAGTGTG | 82 | 2091 |
| 1239506 | N/A | N/A | 13779 | 13798 | TCTAAGATACTCTCTGTCAC | 79 | 2092 |
| 1239528 | N/A | N/A | 14210 | 14229 | AAGGAATAATCAAACTAAAT | 94 | 2093 |
| 1239550 | N/A | N/A | 14382 | 14401 | TGTTATTTCCTCTGTGCTTA | 33 | 2094 |
| 1239572 | N/A | N/A | 14802 | 14821 | CTTCCATCACTTCTCACCTG | 70 | 2095 |
| 1239594 | N/A | N/A | 14928 | 14947 | GAGTGACTGAATTTTCTCTC | 107 | 2096 |
| 1239616 | N/A | N/A | 15267 | 15286 | ACATTATTGAAATGGGAAGT | 50 | 2097 |
| 1239638 | N/A | N/A | 15363 | 15382 | TTTTTCATCTCCTTCAGAGC | 74 | 2098 |
| 1239660 | N/A | N/A | 15418 | 15437 | CCCCTTACCTTTATCACCCA | 119 | 2099 |
| 1239682 | N/A | N/A | 15516 | 15535 | ACCATATACCATGTACAGTT | 7 | 2100 |
| 1239704 | N/A | N/A | 15686 | 15705 | TGTGCCGTAAAACCTATAAT | 69 | 2101 |
| 1239726 | N/A | N/A | 15749 | 15768 | AAATGATTGCTAAACAGTAC | 78 | 2102 |
| 1239748 | N/A | N/A | 15831 | 15850 | AAATCAAAAATCTCTTTTCA | 135 | 2103 |
| 1239770 | N/A | N/A | 15875 | 15894 | TCCAGAATGACAATTTATGA | 57 | 2104 |
| 1239792 | N/A | N/A | 15928 | 15947 | GAGTGAATTATTTTCTTCTA | 16 | 2105 |

TABLE 29
Reduction of PRNP RNA

| | SEQ ID | SEQ ID | SEQ ID | SEQ ID | | PRNP | |
|---|---|---|---|---|---|---|---|
| | NO: 1 | NO: 1 | NO: 2 | NO: 2 | | (% UTC) | SEQ |
| Compound | Start | Stop | Start | Stop | | RTS | ID |
| ID | Site | Site | Site | Site | Sequence (5′ to 3′) | 42354 | NO |
| 1201142 | 1963 | 1982 | 17754 | 17773 | GCCACATATAGGGTCCTTTA | 13 | 66 |
| 1238121 | 50 | 69 | 3143 | 3162 | ATCATCTTTAATTGGAAATT | 106 | 2106 |
| 1238143 | 117 | 136 | 3210 | 3229 | ACACTTGCATCAGTTGATAC | 126 | 2107 |
| 1238165 | 467 | 486 | 16258 | 16277 | CAGGTCACTCCATGTGGCCA | 91* | 2108 |
| 1238187 | 592 | 611 | 16383 | 16402 | TGAGGCTGCCCCCAGCCACC | 103 | 2109 |
| | 616 | 635 | 16407 | 16426 | | | |
| 1238209 | 857 | 876 | 16648 | 16667 | GTAACGGTCCTCATAGTCAC | 83 | 2110 |
| 1238231 | 1197 | 1216 | 16988 | 17007 | GATGGTGAAAACAGGAAGAC | 82 | 2111 |
| 1238253 | 1419 | 1438 | 17210 | 17229 | TGTTATACTTTTACTGGCCT | 57 | 2112 |
| 1238275 | 1588 | 1607 | 17379 | 17398 | TAGCTATGAAATCTCTACTA | 42 | 2113 |
| 1238297 | 1677 | 1696 | 17468 | 17487 | AGGATTTTTTTGAATAAGTA | 51 | 2114 |
| 1238319 | 1810 | 1829 | 17601 | 17620 | ACAATATTTACTCTTGTTGA | 31 | 2115 |
| 1238341 | 1853 | 1872 | 17644 | 17663 | GTTCACTGTGAATATGTCCT | 4 | 2116 |
| 1238363 | 1882 | 1901 | 17673 | 17692 | CAGAAGCCTTTCATATATGT | 25 | 2117 |
| 1238385 | 1919 | 1938 | 17710 | 17729 | CCAAGGGCACCATTCCCAAA | 87 | 2118 |
| 1238407 | 2002 | 2021 | 17793 | 17812 | TTCAGCTGCCTTAATTACCT | 38 | 2119 |
| 1238429 | 2041 | 2060 | 17832 | 17851 | AAGGAGATTTGCCTTCAGTG | 53 | 2120 |
| 1238451 | 2091 | 2110 | 17882 | 17901 | TGCAGCTCTCCTGTATGTCA | 32 | 2121 |
| 1238473 | 2125 | 2144 | 17916 | 17935 | ACATCATCCTCTATGATGAT | 107 | 2122 |
| 1238495 | 2154 | 2173 | 17945 | 17964 | TTTCTTTGCACACTGACCAT | 29 | 2123 |
| 1238517 | 2201 | 2220 | 17992 | 18011 | GGTTTTTGACAATTATGAGA | 4 | 2124 |
| 1238539 | 2245 | 2264 | 18036 | 18055 | GATTCAAAAGCCAATTACAG | 43 | 2125 |
| 1238561 | 2274 | 2293 | 18065 | 18084 | ATATTTTTTAGATTGTCTCC | 52 | 2126 |
| 1238583 | 2304 | 2323 | 18095 | 18114 | CAATCATATTTCTGTCATCT | 26 | 2127 |
| 1238605 | 2333 | 2352 | 18124 | 18143 | TTAACAGAATTTCTTTTTCC | 58 | 2128 |
| 1238627 | 2379 | 2398 | 18170 | 18189 | GTGACAATATCAAACAATTC | 43 | 2129 |
| 1238649 | 2429 | 2448 | 18220 | 18239 | AAAGTGCAAGCCAATAATAA | 60 | 2130 |
| 1238671 | 2525 | 2544 | 18316 | 18335 | ACACTTCAGATGTTAACTGC | 34 | 2131 |
| 1238693 | 2604 | 2623 | 18395 | 18414 | ACATTGTAAGCCTAAGGACC | 31 | 2132 |
| 1238715 | 2725 | 2744 | 18516 | 18535 | TTTTTATATAACAAAACAAG | 91 | 2133 |
| 1238737 | N/A | N/A | 4745 | 4764 | TGATGCTCTCAGAACAAGAA | 39 | 2134 |
| 1238759 | N/A | N/A | 4827 | 4846 | TCCTTAATCCTATTCTACCA | 92 | 2135 |
| 1238781 | N/A | N/A | 4875 | 4894 | TTATCCAATTCCCTGTTCCT | 67 | 2136 |
| 1238803 | N/A | N/A | 4903 | 4922 | TGTTGATTTTTCCAGAAGTT | 15 | 2137 |
| 1238825 | N/A | N/A | 4965 | 4984 | GTAAGTAAAATTGCTCCTTT | 35 | 2138 |
| 1238847 | N/A | N/A | 5044 | 5063 | AAATCACATCCTACCCCTCT | 80 | 2139 |
| 1238869 | N/A | N/A | 5098 | 5117 | TCTTAATATTTTCCTTTCGG | 30 | 2140 |
| 1238891 | N/A | N/A | 5131 | 5150 | ATGACTCATCATTTTGCCAT | 47 | 2141 |
| 1238913 | N/A | N/A | 5193 | 5212 | GTTATTTTAATAGATGTAAA | 106 | 2142 |
| 1238935 | N/A | N/A | 5379 | 5398 | TCATTTCCTCCATTCTATGA | 95 | 2143 |
| 1238957 | N/A | N/A | 5449 | 5468 | TTAACAAAATGTTTGTCACT | 71 | 2144 |
| 1238979 | N/A | N/A | 5579 | 5598 | CTAATTTTAGATCATTCTGC | 44 | 2145 |
| 1239001 | N/A | N/A | 5653 | 5672 | CATTTCAGTTAATGTGTCAT | 30 | 2146 |
| 1239023 | N/A | N/A | 5710 | 5729 | TTTTTCCCCACATATCACAG | 61 | 2147 |
| 1239045 | N/A | N/A | 5782 | 5801 | TCAGATTTTTCACATATGCG | 12 | 2148 |
| 1239067 | N/A | N/A | 5864 | 5883 | AGTGAGAGCAATATATTCAC | 70 | 2149 |
| 1239089 | N/A | N/A | 6054 | 6073 | CCAATACACAAATTACTAAA | 87 | 2150 |
| 1239111 | N/A | N/A | 6314 | 6333 | AGAGCTTGTGATCACAGCCT | 75 | 2151 |
| 1239133 | N/A | N/A | 6442 | 6461 | CCTTACATAATTCAGCATAA | 44 | 2152 |
| 1239155 | N/A | N/A | 6526 | 6545 | GCCATGTTCAGTGTCAGTGT | 34 | 2153 |
| 1239177 | N/A | N/A | 6723 | 6742 | CTTAGGAGTTATTTTATAAT | 81 | 2154 |
| 1239199 | N/A | N/A | 6874 | 6893 | TATAATGCTTTTCACTGAAG | 66 | 2155 |
| 1239221 | N/A | N/A | 7259 | 7278 | GGCAAATGTCAAACAACCCC | 80 | 2156 |
| 1239243 | N/A | N/A | 7715 | 7734 | TCTCTTTCTAATTTTGTACA | 97 | 2157 |
| 1239265 | N/A | N/A | 8187 | 8206 | CATTAATTATCCCCCCATGA | 65 | 2158 |
| 1239287 | N/A | N/A | 8393 | 8412 | CCACATATGACAAGGTCACA | 61 | 2159 |
| 1239309 | N/A | N/A | 8702 | 8721 | GCAGTATAGGCCAATATCCC | 47 | 2160 |
| 1239331 | N/A | N/A | 9065 | 9084 | AAAGGTAATTTTATAACCCC | 73 | 2161 |
| 1239353 | N/A | N/A | 9421 | 9440 | TAGGTATAATTTTTTTACCT | 111 | 2162 |
| 1239375 | N/A | N/A | 9650 | 9669 | TTGAAAAGTTTTCAATGAAA | 106 | 2163 |
| 1239397 | N/A | N/A | 10090 | 10109 | GCCATCTACTGAAATAGGAC | 105 | 2164 |
| 1239419 | N/A | N/A | 10735 | 10754 | AACACACATTTCAAGTGTCA | 88 | 2165 |
| 1239441 | N/A | N/A | 11088 | 11107 | GTACCATAACCTTTTTTTTT | 40 | 2166 |
| 1239463 | N/A | N/A | 12638 | 12657 | CGGAAATATCATTCGACTCA | 47 | 2167 |
| 1239485 | N/A | N/A | 13548 | 13567 | GACACTATTTGCAATTAGTG | 91 | 2168 |
| 1239507 | N/A | N/A | 13780 | 13799 | ATCTAAGATACTCTCTGTCA | 120 | 2169 |
| 1239529 | N/A | N/A | 14213 | 14232 | CATAAGGAATAATCAAACTA | 102 | 2170 |
| 1239551 | N/A | N/A | 14383 | 14402 | ATGTTATTTCCTCTGTGCTT | 36 | 2171 |
| 1239573 | N/A | N/A | 14808 | 14827 | TCGGTGCTTCCATCACTTCT | 77 | 2172 |
| 1239595 | N/A | N/A | 14930 | 14949 | TAGAGTGACTGAATTTTCTC | 131 | 2173 |
| 1239617 | N/A | N/A | 15269 | 15288 | TAACATTATTGAAATGGGAA | 81 | 2174 |
| 1239639 | N/A | N/A | 15366 | 15385 | TTATTTTTCATCTCCTTCAG | 65 | 2175 |
| 1239661 | N/A | N/A | 15419 | 15438 | ACCCCTTACCTTTATCACCC | 75 | 2176 |
| 1239683 | N/A | N/A | 15517 | 15536 | CACCATATACCATGTACAGT | 22 | 2177 |
| 1239705 | N/A | N/A | 15687 | 15706 | GTGTGCCGTAAAACCTATAA | 51 | 2178 |
| 1239727 | N/A | N/A | 15761 | 15780 | ATGACAATAGTAAAATGATT | 98 | 2179 |
| 1239749 | N/A | N/A | 15832 | 15851 | CAAATCAAAAATCTCTTTTC | 97 | 2180 |
| 1239771 | N/A | N/A | 15877 | 15896 | CATCCAGAATGACAATTTAT | 95 | 2181 |
| 1239793 | N/A | N/A | 15932 | 15951 | TTATGAGTGAATTATTTTCT | 63 | 2182 |

TABLE 30
Reduction of PRNP RNA

| | SEQ ID | SEQ ID | | | SEQ |
|---|---|---|---|---|---|
| Compound | NO: 3 | NO: 3 | | PRNP | ID |
| ID | Start Site | Stop Site | Sequence (5′ to 3′) | (% UTC) | NO |
| 1238727 | 216 | 235 | TGCTCTGAAAAGCGAAGCCA | 97 | 2183 |

### Example 2: Effect of 5-10-5 MOE Gapmers with Mixed Internucleoside Linkages on Human PRNP RNA In Vitro, Single Dose

[0530] Modified oligonucleotides complementary to human PRNP nucleic acid were synthesized and tested for their effect on PRNP RNA levels in vitro.

[0531] The modified oligonucleotides in the tables below are 5-10-5 MOE gapmers with mixed internucleoside linkages. The gapmers are 20 nucleosides in length, wherein the central gap segment consists of ten 2′-β-D-deoxynucleosides and the 3′ and 5′ wings each consist of five 2′-MOE modified nucleosides. The sugar motif of the gapmers is (from 5′ to 3′): eeeeeddddddddddeeeee; wherein “d” represents a 2′-β-D-deoxyribosyl sugar, and ‘e’ represents a 2′-MOE modified ribosyl sugar. The internucleoside linkage motif for the gapmers is (from 5′ to 3′): sooosssssssssssooss; wherein ‘o’ represents a phosphodiester internucleoside linkage and 's′ represents a phosphorothioate internucleoside linkage. Each cytosine residue is a 5-methyl cytosine. “Start site” indicates the 5′-most nucleoside to which the gapmer is complementary to in the human sequence. “Stop site” indicates the 3′-most nucleoside to which the gapmer is complementary to in the human sequence. Each modified oligonucleotide listed in the tables below is complementary to human PRNP nucleic acid sequences SEQ ID NO: 1 or SEQ ID NO: 2, as indicated. ‘N/A’ indicates that the modified oligonucleotide is not complementary to that particular nucleic acid with 100% complementarity. As shown below, modified oligonucleotides complementary to the nucleobase sequence of human PRNP reduced the amount of human PRNP RNA.

[0532] Cultured A-431 cells at a density of 20,000 cells per well were treated with 4,000 nM of modified oligonucleotide by free uptake. After a treatment period of approximately 48 hours, total RNA was isolated from the cells and PRNP RNA levels were measured by quantitative real-time RTPCR, using primer probe set RTS42354, as described in Example 1. PRNP RNA levels were normalized using RIBOGREENR Results are presented in the tables below are normalized to PRNP RNA levels in untreated control cells (UTC). Values marked with an asterisk (*) result from oligonucleotides that are complementary to the amplicon region of the primer probe set. Additional assays may be used to measure the potency and efficacy of the modified oligonucleotides complementary to the amplicon region.

TABLE 31
Reduction of PRNP RNA

| | SEQ ID | SEQ ID | SEQ ID | SEQ ID | | | |
|---|---|---|---|---|---|---|---|
| | NO: 1 | NO: 1 | NO: 2 | NO: 2 | | | |
| Compound | Start | Stop | Start | Stop | | PRNP | SEQ |
| ID | Site | Site | Site | Site | Sequence (5′ to 3′) | (% UTC) | ID NO |
| 1201142 | 1963 | 1982 | 17754 | 17773 | GCCACATATAGGGTCCTTTA | 6 | 66 |
| 1270212 | 420 | 439 | 16211 | 16230 | GGTTCGCCATAATGACTGCT | 2* | 2184 |
| 1270213 | 423 | 442 | 16214 | 16233 | CAAGGTTCGCCATAATGACT | 23* | 2185 |
| 1270218 | 506 | 525 | 16297 | 16316 | GTTCCATCCTCCAGGCTTCG | 5* | 2186 |
| 1270219 | 507 | 526 | 16298 | 16317 | TGTTCCATCCTCCAGGCTTC | 11* | 2187 |
| 1270224 | 516 | 535 | 16307 | 16326 | TGCCCCCAGTGTTCCATCCT | 5* | 2188 |
| 1270225 | 517 | 536 | 16308 | 16327 | CTGCCCCCAGTGTTCCATCC | 5 | 2189 |
| 1270230 | 1335 | 1354 | 17126 | 17145 | CTATGTTTTCCAGTGCCCAT | 12 | 2190 |
| 1270231 | 1337 | 1356 | 17128 | 17147 | CTCTATGTTTTCCAGTGCCC | 4 | 2191 |
| 1270236 | 1425 | 1444 | 17216 | 17235 | ATTTGCTGTTATACTTTTAC | 6 | 2192 |
| 1270237 | 1426 | 1445 | 17217 | 17236 | TATTTGCTGTTATACTTTTA | 17 | 2193 |
| 1270242 | 1455 | 1474 | 17246 | 17265 | CCAAAAATAAGTCCAGATTA | 27 | 2194 |
| 1270243 | 1456 | 1475 | 17247 | 17266 | TCCAAAAATAAGTCCAGATT | 30 | 2195 |
| 1270248 | 1512 | 1531 | 17303 | 17322 | CAAAGGTATTTCAGACTGTT | 9 | 2196 |
| 1270249 | 1513 | 1532 | 17304 | 17323 | GCAAAGGTATTTCAGACTGT | 16 | 2197 |
| 1270254 | 1559 | 1578 | 17350 | 17369 | ATTAGTATACTGAGCTCTAG | 36 | 2198 |
| 1270255 | 1565 | 1584 | 17356 | 17375 | TAGGGCATTAGTATACTGAG | 3 | 2199 |
| 1270260 | 1618 | 1637 | 17409 | 17428 | GGTTTTCTTAAAATGGAAAA | 72 | 2200 |
| 1270261 | 1622 | 1641 | 17413 | 17432 | GTCGGGTTTTCTTAAAATGG | 10 | 2201 |
| 1270266 | 1827 | 1846 | 17618 | 17637 | AGAGGTTCAGTGTTGTGACA | 17 | 2202 |
| 1270267 | 1841 | 1860 | 17632 | 17651 | TATGTCCTCTAGCCAGAGGT | 75 | 2203 |
| 1270272 | 1856 | 1875 | 17647 | 17666 | TATGTTCACTGTGAATATGT | 26 | 2204 |
| 1270273 | 1871 | 1890 | 17662 | 17681 | CATATATGTTACAGTTATGT | 35 | 2205 |
| 1270278 | 1895 | 1914 | 17686 | 17705 | TGATTTCAAGTCCCAGAAGC | 23 | 2206 |
| 1270279 | 1960 | 1979 | 17751 | 17770 | ACATATAGGGTCCTTTAAAC | 55 | 2207 |
| 1270284 | 1971 | 1990 | 17762 | 17781 | AAAGGAATGCCACATATAGG | 16 | 2208 |
| 1270285 | 1973 | 1992 | 17764 | 17783 | AGAAAGGAATGCCACATATA | 32 | 2209 |
| 1270290 | 2006 | 2025 | 17797 | 17816 | ACTTTTCAGCTGCCTTAATT | 33 | 2210 |
| 1270291 | 2007 | 2026 | 17798 | 17817 | TACTTTTCAGCTGCCTTAAT | 30 | 2211 |
| 1270296 | 2072 | 2091 | 17863 | 17882 | AAAATCATTCTGGTTTCCAG | 22 | 2212 |
| 1270297 | 2073 | 2092 | 17864 | 17883 | CAAAATCATTCTGGTTTCCA | 20 | 2213 |
| 1270302 | 2150 | 2169 | 17941 | 17960 | TTTGCACACTGACCATTTTT | 42 | 2214 |
| 1270303 | 2151 | 2170 | 17942 | 17961 | CTTTGCACACTGACCATTTT | 26 | 2215 |
| 1270308 | 2202 | 2221 | 17993 | 18012 | TGGTTTTTGACAATTATGAG | 4 | 2216 |
| 1270309 | 2203 | 2222 | 17994 | 18013 | CTGGTTTTTGACAATTATGA | 2 | 2217 |
| 1270314 | 2290 | 2309 | 18081 | 18100 | TCATCTCCAACCTAAGATAT | 52 | 2218 |
| 1270315 | 2323 | 2342 | 18114 | 18133 | TTCTTTTTCCACTTCAAATC | 50 | 2219 |
| 1270320 | 2358 | 2377 | 18149 | 18168 | GGGAATAATTTTACTTTAAT | 26 | 2220 |
| 1270321 | 2359 | 2378 | 18150 | 18169 | AGGGAATAATTTTACTTTAA | 14 | 2221 |
| 1270326 | 2419 | 2438 | 18210 | 18229 | CCAATAATAACATTGCAGAA | 18 | 2222 |
| 1270327 | 2421 | 2440 | 18212 | 18231 | AGCCAATAATAACATTGCAG | 9 | 2223 |
| 1270332 | 2573 | 2592 | 18364 | 18383 | TTTCCCACATATTAAGTATT | 43 | 2224 |
| 1270333 | 2577 | 2596 | 18368 | 18387 | AGGGTTTCCCACATATTAAG | 33 | 2225 |
| 1270338 | 2612 | 2631 | 18403 | 18422 | TTCAGTGCACATTGTAAGCC | 13 | 2226 |
| 1270339 | N/A | N/A | 4894 | 4913 | TTCCAGAAGTTTAACATATT | 29 | 2227 |
| 1270344 | N/A | N/A | 4908 | 4927 | AGCGTTGTTGATTTTTCCAG | 9 | 2228 |
| 1270350 | N/A | N/A | 4998 | 5017 | TTTTTTTCACTGTAAGACCT | 31 | 2229 |
| 1270356 | N/A | N/A | 5072 | 5091 | AGACTTGTGTTAGATATAAA | 35 | 2230 |
| 1270362 | N/A | N/A | 5081 | 5100 | CGGTGTGGAAGACTTGTGTT | 15 | 2231 |
| 1270368 | N/A | N/A | 5190 | 5209 | ATTTTAATAGATGTAAAATG | 97 | 2232 |
| 1270374 | N/A | N/A | 5517 | 5536 | CAGGTAAGTTCTCAGGAGTG | 12 | 2233 |
| 1270380 | N/A | N/A | 5530 | 5549 | GTTTCTTCCATTGCAGGTAA | 2 | 2234 |
| 1270386 | N/A | N/A | 5538 | 5557 | GTTTGTTTGTTTCTTCCATT | 2 | 2235 |
| 1270392 | N/A | N/A | 5607 | 5626 | TATACATTTAGGCTCTTTTC | 22 | 2236 |
| 1270398 | N/A | N/A | 5636 | 5655 | CATAATTTTCTTAGCTACTG | 32 | 2237 |
| 1270404 | N/A | N/A | 5674 | 5693 | TTTTAGTGGTTACATAATGT | 66 | 2238 |
| 1270410 | N/A | N/A | 5779 | 5798 | GATTTTTCACATATGCGTTC | 8 | 2239 |
| 1270416 | N/A | N/A | 5794 | 5813 | GTGCTTTTCCTTTCAGATTT | 21 | 2240 |
| 1270422 | N/A | N/A | 5855 | 5874 | AATATATTCACCAAAGGAAA | 63 | 2241 |
| 1270428 | N/A | N/A | 6216 | 6235 | ATCTGTTGTGGTTCAGCTAA | 42 | 2242 |
| 1270434 | N/A | N/A | 6224 | 6243 | TATGTACAATCTGTTGTGGT | 19 | 2243 |
| 1270440 | N/A | N/A | 6496 | 6515 | CTTCTGTTATGTTATTATTG | 34 | 2244 |
| 1270446 | N/A | N/A | 7280 | 7299 | TAATTAGTTACATCGGGAAG | 64 | 2245 |
| 1270452 | N/A | N/A | 7387 | 7406 | TAGTAAGAACTTATCCCAAG | 59 | 2246 |
| 1270458 | N/A | N/A | 8039 | 8058 | ATGGCACTTTCTTTTTATTT | 20 | 2247 |
| 1270464 | N/A | N/A | 8166 | 8185 | CACAGGCTATCTTTCTATTT | 46 | 2248 |
| 1270470 | N/A | N/A | 9024 | 9043 | GATTTTTGGACGGGAGATTT | 57 | 2249 |
| 1270476 | N/A | N/A | 9034 | 9053 | GGATCTCTTAGATTTTTGGA | 40 | 2250 |
| 1270482 | N/A | N/A | 9042 | 9061 | TTTGCTTTGGATCTCTTAGA | 23 | 2251 |
| 1270488 | N/A | N/A | 9358 | 9377 | CAGGGTGGTAGTTTTTCAAA | 10 | 2252 |
| 1270494 | N/A | N/A | 9686 | 9705 | ATTAATAGGTTAGGAAGAAA | 91 | 2253 |
| 1270500 | N/A | N/A | 9694 | 9713 | GGAGCTCTATTAATAGGTTA | 63 | 2254 |
| 1270506 | N/A | N/A | 9984 | 10003 | GTGGGAGTATCAATTTAAGC | 46 | 2255 |
| 1270512 | N/A | N/A | 11334 | 11353 | TGTTGTTTCTTTTCTGGTAG | 12 | 2256 |
| 1270518 | N/A | N/A | 14380 | 14399 | TTATTTCCTCTGTGCTTATT | 54 | 2257 |
| 1270524 | N/A | N/A | 15164 | 15183 | TTTTTGGAGGCTCTTTTAGG | 53 | 2258 |
| 1270530 | N/A | N/A | 15515 | 15534 | CCATATACCATGTACAGTTC | 17 | 2259 |
| 1270536 | N/A | N/A | 15623 | 15642 | GGATGATCTGCAATTGTTTT | 24 | 2260 |

TABLE 32
Reduction of PRNP RNA

| | SEQ ID | SEQ ID | SEQ ID | SEQ ID | | | |
|---|---|---|---|---|---|---|---|
| | NO: 1 | NO: 1 | NO: 2 | NO: 2 | | | |
| Compound | Start | Stop | Start | Stop | | PRNP | SEQ |
| ID | Site | Site | Site | Site | Sequence (5′ to 3′) | (% UTC) | ID NO |
| 1201142 | 1963 | 1982 | 17754 | 17773 | GCCACATATAGGGTCCTTTA | 7 | 66 |
| 1270214 | 425 | 444 | 16216 | 16235 | GCCAAGGTTCGCCATAATGA | 10* | 2261 |
| 1270220 | 509 | 528 | 16300 | 16319 | AGTGTTCCATCCTCCAGGCT | 5* | 2262 |
| 1270226 | 518 | 537 | 16309 | 16328 | GCTGCCCCCAGTGTTCCATC | 12* | 2263 |
| 1270232 | 1338 | 1357 | 17129 | 17148 | ACTCTATGTTTTCCAGTGCC | 7 | 2264 |
| 1270238 | 1427 | 1446 | 17218 | 17237 | TTATTTGCTGTTATACTTTT | 31 | 2265 |
| 1270244 | 1458 | 1477 | 17249 | 17268 | AGTCCAAAAATAAGTCCAGA | 12 | 2266 |
| 1270250 | 1515 | 1534 | 17306 | 17325 | AGGCAAAGGTATTTCAGACT | 3 | 2267 |
| 1270256 | 1566 | 1585 | 17357 | 17376 | ATAGGGCATTAGTATACTGA | 5 | 2268 |
| 1270262 | 1623 | 1642 | 17414 | 17433 | TGTCGGGTTTTCTTAAAATG | 16 | 2269 |
| 1270268 | 1843 | 1862 | 17634 | 17653 | AATATGTCCTCTAGCCAGAG | 37 | 2270 |
| 1270274 | 1872 | 1891 | 17663 | 17682 | TCATATATGTTACAGTTATG | 22 | 2271 |
| 1270280 | 1961 | 1980 | 17752 | 17771 | CACATATAGGGTCCTTTAAA | 30 | 2272 |
| 1270286 | 1992 | 2011 | 17783 | 17802 | TTAATTACCTATAGTTTAAA | 42 | 2273 |
| 1270292 | 2008 | 2027 | 17799 | 17818 | TTACTTTTCAGCTGCCTTAA | 19 | 2274 |
| 1270298 | 2084 | 2103 | 17875 | 17894 | CTCCTGTATGTCAAAATCAT | 55 | 2275 |
| 1270304 | 2169 | 2188 | 17960 | 17979 | AATGCAAGCAGTTCTTTTCT | 14 | 2276 |
| 1270310 | 2204 | 2223 | 17995 | 18014 | TCTGGTTTTTGACAATTATG | 3 | 2277 |
| 1270316 | 2324 | 2343 | 18115 | 18134 | TTTCTTTTTCCACTTCAAAT | 26 | 2278 |
| 1270322 | 2365 | 2384 | 18156 | 18175 | CAATTCAGGGAATAATTTTA | 61 | 2279 |
| 1270328 | 2423 | 2442 | 18214 | 18233 | CAAGCCAATAATAACATTGC | 28 | 2280 |
| 1270334 | 2605 | 2624 | 18396 | 18415 | CACATTGTAAGCCTAAGGAC | 20 | 2281 |
| 1270340 | N/A | N/A | 4897 | 4916 | TTTTTCCAGAAGTTTAACAT | 69 | 2282 |
| 1270345 | N/A | N/A | 4910 | 4929 | AGAGCGTTGTTGATTTTTCC | 4 | 2283 |
| 1270346 | N/A | N/A | 4935 | 4954 | TTTTTTCCTTTCTTCTACAA | 117 | 2284 |
| 1270351 | N/A | N/A | 5000 | 5019 | GCTTTTTTTCACTGTAAGAC | 2 | 2285 |
| 1270352 | N/A | N/A | 5001 | 5020 | AGCTTTTTTTCACTGTAAGA | 8 | 2286 |
| 1270357 | N/A | N/A | 5073 | 5092 | AAGACTTGTGTTAGATATAA | 24 | 2287 |
| 1270358 | N/A | N/A | 5074 | 5093 | GAAGACTTGTGTTAGATATA | 10 | 2288 |
| 1270363 | N/A | N/A | 5126 | 5145 | TCATCATTTTGCCATTTATC | 10 | 2289 |
| 1270364 | N/A | N/A | 5127 | 5146 | CTCATCATTTTGCCATTTAT | 7 | 2290 |
| 1270369 | N/A | N/A | 5192 | 5211 | TTATTTTAATAGATGTAAAA | 83 | 2291 |
| 1270370 | N/A | N/A | 5194 | 5213 | GGTTATTTTAATAGATGTAA | 4 | 2292 |
| 1270375 | N/A | N/A | 5519 | 5538 | TGCAGGTAAGTTCTCAGGAG | 12 | 2293 |
| 1270376 | N/A | N/A | 5521 | 5540 | ATTGCAGGTAAGTTCTCAGG | 7 | 2294 |
| 1270381 | N/A | N/A | 5532 | 5551 | TTGTTTCTTCCATTGCAGGT | 17 | 2295 |
| 1270382 | N/A | N/A | 5533 | 5552 | TTTGTTTCTTCCATTGCAGG | 27 | 2296 |
| 1270387 | N/A | N/A | 5540 | 5559 | TTGTTTGTTTGTTTCTTCCA | 4 | 2297 |
| 1270388 | N/A | N/A | 5597 | 5616 | GGCTCTTTTCCAGGTGTTCT | 9 | 2298 |
| 1270393 | N/A | N/A | 5608 | 5627 | TTATACATTTAGGCTCTTTT | 21 | 2299 |
| 1270394 | N/A | N/A | 5610 | 5629 | TGTTATACATTTAGGCTCTT | 8 | 2300 |
| 1270399 | N/A | N/A | 5637 | 5656 | TCATAATTTTCTTAGCTACT | 32 | 2301 |
| 1270400 | N/A | N/A | 5640 | 5659 | GTGTCATAATTTTCTTAGCT | 7 | 2302 |
| 1270405 | N/A | N/A | 5711 | 5730 | GTTTTTCCCCACATATCACA | 21 | 2303 |
| 1270406 | N/A | N/A | 5715 | 5734 | GTCAGTTTTTCCCCACATAT | 7 | 2304 |
| 1270411 | N/A | N/A | 5780 | 5799 | AGATTTTTCACATATGCGTT | 12 | 2305 |
| 1270412 | N/A | N/A | 5781 | 5800 | CAGATTTTTCACATATGCGT | 11 | 2306 |
| 1270417 | N/A | N/A | 5796 | 5815 | CTGTGCTTTTCCTTTCAGAT | 18 | 2307 |
| 1270418 | N/A | N/A | 5798 | 5817 | TTCTGTGCTTTTCCTTTCAG | 29 | 2308 |
| 1270423 | N/A | N/A | 5856 | 5875 | CAATATATTCACCAAAGGAA | 45 | 2309 |
| 1270424 | N/A | N/A | 5858 | 5877 | AGCAATATATTCACCAAAGG | 13 | 2310 |
| 1270429 | N/A | N/A | 6217 | 6236 | AATCTGTTGTGGTTCAGCTA | 18 | 2311 |
| 1270430 | N/A | N/A | 6218 | 6237 | CAATCTGTTGTGGTTCAGCT | 11 | 2312 |
| 1270435 | N/A | N/A | 6488 | 6507 | ATGTTATTATTGTTATTTGA | 42 | 2313 |
| 1270436 | N/A | N/A | 6490 | 6509 | TTATGTTATTATTGTTATTT | 71 | 2314 |
| 1270441 | N/A | N/A | 6498 | 6517 | AACTTCTGTTATGTTATTAT | 33 | 2315 |
| 1270442 | N/A | N/A | 6565 | 6584 | CAGAGAATCTTTCACCTTGG | 21 | 2316 |
| 1270447 | N/A | N/A | 7281 | 7300 | TTAATTAGTTACATCGGGAA | 31 | 2317 |
| 1270448 | N/A | N/A | 7285 | 7304 | AAGCTTAATTAGTTACATCG | 32 | 2318 |
| 1270453 | N/A | N/A | 7391 | 7410 | GAGCTAGTAAGAACTTATCC | 50 | 2319 |
| 1270454 | N/A | N/A | 7393 | 7412 | CAGAGCTAGTAAGAACTTAT | 26 | 2320 |
| 1270459 | N/A | N/A | 8041 | 8060 | AAATGGCACTTTCTTTTTAT | 20 | 2321 |
| 1270460 | N/A | N/A | 8156 | 8175 | CTTTCTATTTGTGTCTCCTT | 22 | 2322 |
| 1270465 | N/A | N/A | 8167 | 8186 | GCACAGGCTATCTTTCTATT | 16 | 2323 |
| 1270466 | N/A | N/A | 8169 | 8188 | GAGCACAGGCTATCTTTCTA | 22 | 2324 |
| 1270471 | N/A | N/A | 9026 | 9045 | TAGATTTTTGGACGGGAGAT | 28 | 2325 |
| 1270472 | N/A | N/A | 9027 | 9046 | TTAGATTTTTGGACGGGAGA | 41 | 2326 |
| 1270477 | N/A | N/A | 9036 | 9055 | TTGGATCTCTTAGATTTTTG | 35 | 2327 |
| 1270483 | N/A | N/A | 9044 | 9063 | TGTTTGCTTTGGATCTCTTA | 20 | 2328 |
| 1270489 | N/A | N/A | 9413 | 9432 | ATTTTTTTACCTGGAAAATC | 72 | 2329 |
| 1270495 | N/A | N/A | 9687 | 9706 | TATTAATAGGTTAGGAAGAA | 70 | 2330 |
| 1270501 | N/A | N/A | 9696 | 9715 | CAGGAGCTCTATTAATAGGT | 24 | 2331 |
| 1270507 | N/A | N/A | 9985 | 10004 | AGTGGGAGTATCAATTTAAG | 42 | 2332 |
| 1270513 | N/A | N/A | 11337 | 11356 | TGTTGTTGTTTCTTTTCTGG | 7 | 2333 |
| 1270519 | N/A | N/A | 14381 | 14400 | GTTATTTCCTCTGTGCTTAT | 12 | 2334 |
| 1270525 | N/A | N/A | 15165 | 15184 | GTTTTTGGAGGCTCTTTTAG | 41 | 2335 |
| 1270531 | N/A | N/A | 15518 | 15537 | TCACCATATACCATGTACAG | 50 | 2336 |
| 1270537 | N/A | N/A | 15626 | 15645 | CTGGGATGATCTGCAATTGT | 40 | 2337 |

TABLE 33
Reduction of PRNP RNA

| | SEQ ID | SEQ ID | SEQ ID | SEQ ID | | | |
|---|---|---|---|---|---|---|---|
| | NO: 1 | NO: 1 | NO: 2 | NO: 2 | | | |
| Compound | Start | Stop | Start | Stop | | PRNP | SEQ |
| ID | Site | Site | Site | Site | Sequence (5′ to 3′) | (% UTC) | ID NO |
| 1201142 | 1963 | 1982 | 17754 | 17773 | GCCACATATAGGGTCCTTTA | 6 | 66 |
| 1270215 | 427 | 446 | 16218 | 16237 | CAGCCAAGGTTCGCCATAAT | 19* | 2338 |
| 1270216 | 503 | 522 | 16294 | 16313 | CCATCCTCCAGGCTTCGGGC | 13* | 2339 |
| 1270221 | 511 | 530 | 16302 | 16321 | CCAGTGTTCCATCCTCCAGG | 4* | 2340 |
| 1270222 | 514 | 533 | 16305 | 16324 | CCCCCAGTGTTCCATCCTCC | 6* | 2341 |
| 1270227 | 1331 | 1350 | 17122 | 17141 | GTTTTCCAGTGCCCATCAGT | 13 | 2342 |
| 1270228 | 1333 | 1352 | 17124 | 17143 | ATGTTTTCCAGTGCCCATCA | 9 | 2343 |
| 1270233 | 1339 | 1358 | 17130 | 17149 | TACTCTATGTTTTCCAGTGC | 19 | 2344 |
| 1270234 | 1422 | 1441 | 17213 | 17232 | TGCTGTTATACTTTTACTGG | 6 | 2345 |
| 1270239 | 1429 | 1448 | 17220 | 17239 | GGTTATTTGCTGTTATACTT | 3 | 2346 |
| 1270240 | 1452 | 1471 | 17243 | 17262 | AAAATAAGTCCAGATTAACC | 66 | 2347 |
| 1270245 | 1459 | 1478 | 17250 | 17269 | AAGTCCAAAAATAAGTCCAG | 25 | 2348 |
| 1270246 | 1509 | 1528 | 17300 | 17319 | AGGTATTTCAGACTGTTCTG | 7 | 2349 |
| 1270251 | 1516 | 1535 | 17307 | 17326 | CAGGCAAAGGTATTTCAGAC | 14 | 2350 |
| 1270252 | 1517 | 1536 | 17308 | 17327 | CCAGGCAAAGGTATTTCAGA | 16 | 2351 |
| 1270257 | 1567 | 1586 | 17358 | 17377 | GATAGGGCATTAGTATACTG | 4 | 2352 |
| 1270258 | 1569 | 1588 | 17360 | 17379 | AAGATAGGGCATTAGTATAC | 28 | 2353 |
| 1270263 | 1625 | 1644 | 17416 | 17435 | GTTGTCGGGTTTTCTTAAAA | 12 | 2354 |
| 1270264 | 1820 | 1839 | 17611 | 17630 | CAGTGTTGTGACAATATTTA | 7 | 2355 |
| 1270269 | 1844 | 1863 | 17635 | 17654 | GAATATGTCCTCTAGCCAGA | 23 | 2356 |
| 1270270 | 1849 | 1868 | 17640 | 17659 | ACTGTGAATATGTCCTCTAG | 6 | 2357 |
| 1270275 | 1878 | 1897 | 17669 | 17688 | AGCCTTTCATATATGTTACA | 18 | 2358 |
| 1270276 | 1880 | 1899 | 17671 | 17690 | GAAGCCTTTCATATATGTTA | 8 | 2359 |
| 1270281 | 1964 | 1983 | 17755 | 17774 | TGCCACATATAGGGTCCTTT | 5 | 2360 |
| 1270287 | 1999 | 2018 | 17790 | 17809 | AGCTGCCTTAATTACCTATA | 14 | 2361 |
| 1270293 | 2011 | 2030 | 17802 | 17821 | AATTTACTTTTCAGCTGCCT | 10 | 2362 |
| 1270299 | 2105 | 2124 | 17896 | 17915 | GGTGCTTTCACAACTGCAGC | 37 | 2363 |
| 1270305 | 2171 | 2190 | 17962 | 17981 | GAAATGCAAGCAGTTCTTTT | 23 | 2364 |
| 1270311 | 2206 | 2225 | 17997 | 18016 | ATTCTGGTTTTTGACAATTA | 11 | 2365 |
| 1270317 | 2325 | 2344 | 18116 | 18135 | ATTTCTTTTTCCACTTCAAA | 15 | 2366 |
| 1270323 | 2415 | 2434 | 18206 | 18225 | TAATAACATTGCAGAAAAGT | 65 | 2367 |
| 1270329 | 2569 | 2588 | 18360 | 18379 | CCACATATTAAGTATTCAGT | 3 | 2368 |
| 1270335 | 2606 | 2625 | 18397 | 18416 | GCACATTGTAAGCCTAAGGA | 2 | 2369 |
| 1270341 | N/A | N/A | 4900 | 4919 | TGATTTTTCCAGAAGTTTAA | 42 | 2370 |
| 1270347 | N/A | N/A | 4936 | 4955 | ATTTTTTCCTTTCTTCTACA | 78 | 2371 |
| 1270353 | N/A | N/A | 5010 | 5029 | TTACTGGTTAGCTTTTTTTC | 44 | 2372 |
| 1270359 | N/A | N/A | 5075 | 5094 | GGAAGACTTGTGTTAGATAT | 7 | 2373 |
| 1270365 | N/A | N/A | 5129 | 5148 | GACTCATCATTTTGCCATTT | 10 | 2374 |
| 1270371 | N/A | N/A | 5197 | 5216 | TTTGGTTATTTTAATAGATG | 62 | 2375 |
| 1270377 | N/A | N/A | 5522 | 5541 | CATTGCAGGTAAGTTCTCAG | 9 | 2376 |
| 1270383 | N/A | N/A | 5534 | 5553 | GTTTGTTTCTTCCATTGCAG | 8 | 2377 |
| 1270389 | N/A | N/A | 5603 | 5622 | CATTTAGGCTCTTTTCCAGG | 20 | 2378 |
| 1270395 | N/A | N/A | 5615 | 5634 | CCTGGTGTTATACATTTAGG | 68 | 2379 |
| 1270401 | N/A | N/A | 5665 | 5684 | TTACATAATGTTCATTTCAG | 50 | 2380 |
| 1270407 | N/A | N/A | 5722 | 5741 | TTTACTTGTCAGTTTTTCCC | 26 | 2381 |
| 1270413 | N/A | N/A | 5787 | 5806 | TCCTTTCAGATTTTTCACAT | 38 | 2382 |
| 1270419 | N/A | N/A | 5800 | 5819 | TTTTCTGTGCTTTTCCTTTC | 20 | 2383 |
| 1270425 | N/A | N/A | 5863 | 5882 | GTGAGAGCAATATATTCACC | 69 | 2384 |
| 1270431 | N/A | N/A | 6220 | 6239 | TACAATCTGTTGTGGTTCAG | 19 | 2385 |
| 1270437 | N/A | N/A | 6491 | 6510 | GTTATGTTATTATTGTTATT | 25 | 2386 |
| 1270443 | N/A | N/A | 6566 | 6585 | TCAGAGAATCTTTCACCTTG | 21 | 2387 |
| 1270449 | N/A | N/A | 7288 | 7307 | TTGAAGCTTAATTAGTTACA | 22 | 2388 |
| 1270455 | N/A | N/A | 8035 | 8054 | CACTTTCTTTTTATTTCTTT | 23 | 2389 |
| 1270461 | N/A | N/A | 8158 | 8177 | ATCTTTCTATTTGTGTCTCC | 19 | 2390 |
| 1270467 | N/A | N/A | 8170 | 8189 | TGAGCACAGGCTATCTTTCT | 36 | 2391 |
| 1270473 | N/A | N/A | 9028 | 9047 | CTTAGATTTTTGGACGGGAG | 16 | 2392 |
| 1270478 | N/A | N/A | 9037 | 9056 | TTTGGATCTCTTAGATTTTT | 31 | 2393 |
| 1270479 | N/A | N/A | 9038 | 9057 | CTTTGGATCTCTTAGATTTT | 33 | 2394 |
| 1270484 | N/A | N/A | 9348 | 9367 | GTTTTTCAAATCAACAAATC | 63 | 2395 |
| 1270485 | N/A | N/A | 9350 | 9369 | TAGTTTTTCAAATCAACAAA | 84 | 2396 |
| 1270490 | N/A | N/A | 9415 | 9434 | TAATTTTTTTACCTGGAAAA | 78 | 2397 |
| 1270491 | N/A | N/A | 9416 | 9435 | ATAATTTTTTTACCTGGAAA | 94 | 2398 |
| 1270496 | N/A | N/A | 9688 | 9707 | CTATTAATAGGTTAGGAAGA | 68 | 2399 |
| 1270497 | N/A | N/A | 9689 | 9708 | TCTATTAATAGGTTAGGAAG | 73 | 2400 |
| 1270502 | N/A | N/A | 9697 | 9716 | TCAGGAGCTCTATTAATAGG | 32 | 2401 |
| 1270503 | N/A | N/A | 9978 | 9997 | GTATCAATTTAAGCAATTGT | 37 | 2402 |
| 1270508 | N/A | N/A | 9986 | 10005 | AAGTGGGAGTATCAATTTAA | 41 | 2403 |
| 1270509 | N/A | N/A | 9988 | 10007 | TCAAGTGGGAGTATCAATTT | 44 | 2404 |
| 1270514 | N/A | N/A | 11338 | 11357 | TTGTTGTTGTTTCTTTTCTG | 6 | 2405 |
| 1270515 | N/A | N/A | 11339 | 11358 | TTTGTTGTTGTTTCTTTTCT | 14 | 2406 |
| 1270520 | N/A | N/A | 14384 | 14403 | TATGTTATTTCCTCTGTGCT | 34 | 2407 |
| 1270521 | N/A | N/A | 14387 | 14406 | TATTATGTTATTTCCTCTGT | 36 | 2408 |
| 1270526 | N/A | N/A | 15167 | 15186 | GGGTTTTTGGAGGCTCTTTT | 21 | 2409 |
| 1270527 | N/A | N/A | 15511 | 15530 | ATACCATGTACAGTTCAATG | 27 | 2410 |
| 1270532 | N/A | N/A | 15519 | 15538 | TTCACCATATACCATGTACA | 58 | 2411 |
| 1270533 | N/A | N/A | 15521 | 15540 | AATTCACCATATACCATGTA | 79 | 2412 |
| 1270538 | N/A | N/A | 15627 | 15646 | GCTGGGATGATCTGCAATTG | 60 | 2413 |
| 1270539 | N/A | N/A | 15629 | 15648 | GTGCTGGGATGATCTGCAAT | 62 | 2414 |

TABLE 34
Reduction of PRNP RNA

| | SEQ ID | SEQ ID | SEQ ID | SEQ ID | | | |
|---|---|---|---|---|---|---|---|
| | NO: 1 | NO: 1 | NO: 2 | NO: 2 | | | |
| Compound | Start | Stop | Start | Stop | | PRNP | SEQ |
| ID | Site | Site | Site | Site | Sequence (5′ to 3′) | (% UTC) | ID NO |
| 1201142 | 1963 | 1982 | 17754 | 17773 | GCCACATATAGGGTCCTTTA | 7 | 66 |
| 1270217 | 505 | 524 | 16296 | 16315 | TTCCATCCTCCAGGCTTCGG | 8* | 2415 |
| 1270223 | 515 | 534 | 16306 | 16325 | GCCCCCAGTGTTCCATCCTC | 6* | 2416 |
| 1270229 | 1334 | 1353 | 17125 | 17144 | TATGTTTTCCAGTGCCCATC | 16 | 2417 |
| 1270235 | 1423 | 1442 | 17214 | 17233 | TTGCTGTTATACTTTTACTG | 6 | 2418 |
| 1270241 | 1454 | 1473 | 17245 | 17264 | CAAAAATAAGTCCAGATTAA | 60 | 2419 |
| 1270247 | 1511 | 1530 | 17302 | 17321 | AAAGGTATTTCAGACTGTTC | 9 | 2420 |
| 1270253 | 1519 | 1538 | 17310 | 17329 | ATCCAGGCAAAGGTATTTCA | 13 | 2421 |
| 1270259 | 1615 | 1634 | 17406 | 17425 | TTTCTTAAAATGGAAAATAT | 77 | 2422 |
| 1270265 | 1822 | 1841 | 17613 | 17632 | TTCAGTGTTGTGACAATATT | 5 | 2423 |
| 1270271 | 1850 | 1869 | 17641 | 17660 | CACTGTGAATATGTCCTCTA | 7 | 2424 |
| 1270277 | 1894 | 1913 | 17685 | 17704 | GATTTCAAGTCCCAGAAGCC | 21 | 2425 |
| 1270282 | 1966 | 1985 | 17757 | 17776 | AATGCCACATATAGGGTCCT | 13 | 2426 |
| 1270283 | 1970 | 1989 | 17761 | 17780 | AAGGAATGCCACATATAGGG | 6 | 2427 |
| 1270288 | 2004 | 2023 | 17795 | 17814 | TTTTCAGCTGCCTTAATTAC | 72 | 2428 |
| 1270289 | 2005 | 2024 | 17796 | 17815 | CTTTTCAGCTGCCTTAATTA | 56 | 2429 |
| 1270294 | 2065 | 2084 | 17856 | 17875 | TTCTGGTTTCCAGGTAAATG | 19 | 2430 |
| 1270295 | 2067 | 2086 | 17858 | 17877 | CATTCTGGTTTCCAGGTAAA | 13 | 2431 |
| 1270300 | 2144 | 2163 | 17935 | 17954 | CACTGACCATTTTTTAATTA | 55 | 2432 |
| 1270301 | 2146 | 2165 | 17937 | 17956 | CACACTGACCATTTTTTAAT | 32 | 2433 |
| 1270306 | 2196 | 2215 | 17987 | 18006 | TTGACAATTATGAGACAGAA | 8 | 2434 |
| 1270307 | 2198 | 2217 | 17989 | 18008 | TTTTGACAATTATGAGACAG | 17 | 2435 |
| 1270312 | 2269 | 2288 | 18060 | 18079 | TTTTAGATTGTCTCCCTATT | 50 | 2436 |
| 1270313 | 2288 | 2307 | 18079 | 18098 | ATCTCCAACCTAAGATATTT | 57 | 2437 |
| 1270318 | 2329 | 2348 | 18120 | 18139 | CAGAATTTCTTTTTCCACTT | 13 | 2438 |
| 1270319 | 2355 | 2374 | 18146 | 18165 | AATAATTTTACTTTAATTAA | 110 | 2439 |
| 1270324 | 2417 | 2436 | 18208 | 18227 | AATAATAACATTGCAGAAAA | 92 | 2440 |
| 1270325 | 2418 | 2437 | 18209 | 18228 | CAATAATAACATTGCAGAAA | 72 | 2441 |
| 1270330 | 2571 | 2590 | 18362 | 18381 | TCCCACATATTAAGTATTCA | 22 | 2442 |
| 1270331 | 2572 | 2591 | 18363 | 18382 | TTCCCACATATTAAGTATTC | 36 | 2443 |
| 1270336 | 2608 | 2627 | 18399 | 18418 | GTGCACATTGTAAGCCTAAG | 44 | 2444 |
| 1270337 | 2610 | 2629 | 18401 | 18420 | CAGTGCACATTGTAAGCCTA | 24 | 2445 |
| 1270342 | N/A | N/A | 4906 | 4925 | CGTTGTTGATTTTTCCAGAA | 2 | 2446 |
| 1270343 | N/A | N/A | 4907 | 4926 | GCGTTGTTGATTTTTCCAGA | 2 | 2447 |
| 1270348 | N/A | N/A | 4938 | 4957 | TGATTTTTTCCTTTCTTCTA | 61 | 2448 |
| 1270349 | N/A | N/A | 4944 | 4963 | CACTGGTGATTTTTTCCTTT | 44 | 2449 |
| 1270354 | N/A | N/A | 5011 | 5030 | CTTACTGGTTAGCTTTTTTT | 70 | 2450 |
| 1270355 | N/A | N/A | 5071 | 5090 | GACTTGTGTTAGATATAAAT | 30 | 2451 |
| 1270360 | N/A | N/A | 5078 | 5097 | TGTGGAAGACTTGTGTTAGA | 10 | 2452 |
| 1270361 | N/A | N/A | 5079 | 5098 | GTGTGGAAGACTTGTGTTAG | 24 | 2453 |
| 1270366 | N/A | N/A | 5130 | 5149 | TGACTCATCATTTTGCCATT | 20 | 2454 |
| 1270367 | N/A | N/A | 5135 | 5154 | GTAAATGACTCATCATTTTG | 42 | 2455 |
| 1270372 | N/A | N/A | 5200 | 5219 | TATTTTGGTTATTTTAATAG | 122 | 2456 |
| 1270373 | N/A | N/A | 5515 | 5534 | GGTAAGTTCTCAGGAGTGGG | 22 | 2457 |
| 1270378 | N/A | N/A | 5523 | 5542 | CCATTGCAGGTAAGTTCTCA | 6 | 2458 |
| 1270379 | N/A | N/A | 5525 | 5544 | TTCCATTGCAGGTAAGTTCT | 24 | 2459 |
| 1270384 | N/A | N/A | 5536 | 5555 | TTGTTTGTTTCTTCCATTGC | 10 | 2460 |
| 1270385 | N/A | N/A | 5537 | 5556 | TTTGTTTGTTTCTTCCATTG | 7 | 2461 |
| 1270390 | N/A | N/A | 5604 | 5623 | ACATTTAGGCTCTTTTCCAG | 25 | 2462 |
| 1270391 | N/A | N/A | 5605 | 5624 | TACATTTAGGCTCTTTTCCA | 27 | 2463 |
| 1270396 | N/A | N/A | 5616 | 5635 | CCCTGGTGTTATACATTTAG | 73 | 2464 |
| 1270397 | N/A | N/A | 5618 | 5637 | TGCCCTGGTGTTATACATTT | 82 | 2465 |
| 1270402 | N/A | N/A | 5671 | 5690 | TAGTGGTTACATAATGTTCA | 12 | 2466 |
| 1270403 | N/A | N/A | 5673 | 5692 | TTTAGTGGTTACATAATGTT | 49 | 2467 |
| 1270408 | N/A | N/A | 5777 | 5796 | TTTTTCACATATGCGTTCAC | 24 | 2468 |
| 1270409 | N/A | N/A | 5778 | 5797 | ATTTTTCACATATGCGTTCA | 26 | 2469 |
| 1270414 | N/A | N/A | 5790 | 5809 | TTTTCCTTTCAGATTTTTCA | 46 | 2470 |
| 1270415 | N/A | N/A | 5793 | 5812 | TGCTTTTCCTTTCAGATTTT | 20 | 2471 |
| 1270420 | N/A | N/A | 5852 | 5871 | ATATTCACCAAAGGAAAATT | 68 | 2472 |
| 1270426 | N/A | N/A | 5867 | 5886 | CTTAGTGAGAGCAATATATT | 62 | 2473 |
| 1270432 | N/A | N/A | 6221 | 6240 | GTACAATCTGTTGTGGTTCA | 12 | 2474 |
| 1270438 | N/A | N/A | 6492 | 6511 | TGTTATGTTATTATTGTTAT | 34 | 2475 |
| 1270444 | N/A | N/A | 6571 | 6590 | GAAGTTCAGAGAATCTTTCA | 85 | 2476 |
| 1270450 | N/A | N/A | 7383 | 7402 | AAGAACTTATCCCAAGGTTG | 30 | 2477 |
| 1270456 | N/A | N/A | 8036 | 8055 | GCACTTTCTTTTTATTTCTT | 3 | 2478 |
| 1270462 | N/A | N/A | 8164 | 8183 | CAGGCTATCTTTCTATTTGT | 47 | 2479 |
| 1270468 | N/A | N/A | 8171 | 8190 | ATGAGCACAGGCTATCTTTC | 54 | 2480 |
| 1270474 | N/A | N/A | 9030 | 9049 | CTCTTAGATTTTTGGACGGG | 6 | 2481 |
| 1270480 | N/A | N/A | 9040 | 9059 | TGCTTTGGATCTCTTAGATT | 11 | 2482 |
| 1270486 | N/A | N/A | 9352 | 9371 | GGTAGTTTTTCAAATCAACA | 8 | 2483 |
| 1270492 | N/A | N/A | 9419 | 9438 | GGTATAATTTTTTTACCTGG | 54 | 2484 |
| 1270498 | N/A | N/A | 9690 | 9709 | CTCTATTAATAGGTTAGGAA | 60 | 2485 |
| 1270504 | N/A | N/A | 9980 | 9999 | GAGTATCAATTTAAGCAATT | 45 | 2486 |
| 1270510 | N/A | N/A | 11331 | 11350 | TGTTTCTTTTCTGGTAGAGA | 7 | 2487 |
| 1270516 | N/A | N/A | 14377 | 14396 | TTTCCTCTGTGCTTATTATT | 54 | 2488 |
| 1270522 | N/A | N/A | 15160 | 15179 | TGGAGGCTCTTTTAGGTGGG | 46 | 2489 |
| 1270528 | N/A | N/A | 15513 | 15532 | ATATACCATGTACAGTTCAA | 40 | 2490 |
| 1270534 | N/A | N/A | 15619 | 15638 | GATCTGCAATTGTTTTTCTC | 42 | 2491 |

TABLE 35
Reduction of PRNP RNA

| | SEQ ID | SEQ ID | SEQ ID | SEQ ID | | | |
|---|---|---|---|---|---|---|---|
| | NO: 1 | NO: 1 | NO: 2 | NO: 2 | | | |
| Compound | Start | Stop | Start | Stop | | PRNP | SEQ |
| ID | Site | Site | Site | Site | Sequence (5′ to 3′) | (% UTC) | ID NO |
| 1201142 | 1963 | 1982 | 17754 | 17773 | GCCACATATAGGGTCCTTTA | 6 | 66 |
| 1270421 | N/A | N/A | 5854 | 5873 | ATATATTCACCAAAGGAAAA | 73 | 2492 |
| 1270427 | N/A | N/A | 6214 | 6233 | CTGTTGTGGTTCAGCTAAAC | 32 | 2493 |
| 1270433 | N/A | N/A | 6222 | 6241 | TGTACAATCTGTTGTGGTTC | 24 | 2494 |
| 1270439 | N/A | N/A | 6495 | 6514 | TTCTGTTATGTTATTATTGT | 45 | 2495 |
| 1270445 | N/A | N/A | 6573 | 6592 | CTGAAGTTCAGAGAATCTTT | 50 | 2496 |
| 1270451 | N/A | N/A | 7386 | 7405 | AGTAAGAACTTATCCCAAGG | 28 | 2497 |
| 1270457 | N/A | N/A | 8037 | 8056 | GGCACTTTCTTTTTATTTCT | 8 | 2498 |
| 1270463 | N/A | N/A | 8165 | 8184 | ACAGGCTATCTTTCTATTTG | 27 | 2499 |
| 1270469 | N/A | N/A | 8173 | 8192 | CCATGAGCACAGGCTATCTT | 59 | 2500 |
| 1270475 | N/A | N/A | 9032 | 9051 | ATCTCTTAGATTTTTGGACG | 38 | 2501 |
| 1270481 | N/A | N/A | 9041 | 9060 | TTGCTTTGGATCTCTTAGAT | 29 | 2502 |
| 1270487 | N/A | N/A | 9356 | 9375 | GGGTGGTAGTTTTTCAAATC | 30 | 2503 |
| 1270493 | N/A | N/A | 9420 | 9439 | AGGTATAATTTTTTTACCTG | 123 | 2504 |
| 1270499 | N/A | N/A | 9693 | 9712 | GAGCTCTATTAATAGGTTAG | 26 | 2505 |
| 1270505 | N/A | N/A | 9981 | 10000 | GGAGTATCAATTTAAGCAAT | 26 | 2506 |
| 1270511 | N/A | N/A | 11333 | 11352 | GTTGTTTCTTTTCTGGTAGA | 16 | 2507 |
| 1270517 | N/A | N/A | 14379 | 14398 | TATTTCCTCTGTGCTTATTA | 56 | 2508 |
| 1270523 | N/A | N/A | 15163 | 15182 | TTTTGGAGGCTCTTTTAGGT | 30 | 2509 |
| 1270529 | N/A | N/A | 15514 | 15533 | CATATACCATGTACAGTTCA | 48 | 2510 |
| 1270535 | N/A | N/A | 15621 | 15640 | ATGATCTGCAATTGTTTTTC | 37 | 2511 |
| 1270540 | 1560 | 1579 | 17351 | 17370 | CATTAGTATACTGAGCTCTA | 39 | 2512 |
| 1270541 | 1842 | 1861 | 17633 | 17652 | ATATGTCCTCTAGCCAGAGG | 81 | 2513 |
| 1270542 | 1959 | 1978 | 17750 | 17769 | CATATAGGGTCCTTTAAACA | 61 | 2514 |
| 1270543 | 2603 | 2622 | 18394 | 18413 | CATTGTAAGCCTAAGGACCA | 52 | 2515 |
| 1270544 | N/A | N/A | 6215 | 6234 | TCTGTTGTGGTTCAGCTAAA | 30 | 2516 |
| 1270545 | N/A | N/A | 7279 | 7298 | AATTAGTTACATCGGGAAGG | 50 | 2517 |
| 1270546 | N/A | N/A | 9025 | 9044 | AGATTTTTGGACGGGAGATT | 38 | 2518 |
| 1270547 | 504 | 523 | 16295 | 16314 | TCCATCCTCCAGGCTTCGGG | 4* | 2519 |
| 1270548 | 1332 | 1351 | 17123 | 17142 | TGTTTTCCAGTGCCCATCAG | 14 | 2520 |
| 1270549 | 1453 | 1472 | 17244 | 17263 | AAAAATAAGTCCAGATTAAC | 84 | 2521 |
| 1270550 | 1510 | 1529 | 17301 | 17320 | AAGGTATTTCAGACTGTTCT | 6 | 2522 |
| 1270551 | 1809 | 1828 | 17600 | 17619 | CAATATTTACTCTTGTTGAA | 54 | 2523 |
| 1270552 | 1993 | 2012 | 17784 | 17803 | CTTAATTACCTATAGTTTAA | 60 | 2524 |
| 1270553 | 2066 | 2085 | 17857 | 17876 | ATTCTGGTTTCCAGGTAAAT | 17 | 2525 |
| 1270554 | 2197 | 2216 | 17988 | 18007 | TTTGACAATTATGAGACAGA | 16 | 2526 |
| 1270555 | 2356 | 2375 | 18147 | 18166 | GAATAATTTTACTTTAATTA | 106 | 2527 |
| 1270556 | 2416 | 2435 | 18207 | 18226 | ATAATAACATTGCAGAAAAG | 63 | 2528 |
| 1270557 | 2570 | 2589 | 18361 | 18380 | CCCACATATTAAGTATTCAG | 19 | 2529 |
| 1270558 | N/A | N/A | 4898 | 4917 | ATTTTTCCAGAAGTTTAACA | 52 | 2530 |
| 1270559 | N/A | N/A | 5120 | 5139 | TTTTGCCATTTATCTATTAT | 53 | 2531 |
| 1270560 | N/A | N/A | 5516 | 5535 | AGGTAAGTTCTCAGGAGTGG | 14 | 2532 |
| 1270561 | N/A | N/A | 5531 | 5550 | TGTTTCTTCCATTGCAGGTA | 4 | 2533 |
| 1270562 | N/A | N/A | 5598 | 5617 | AGGCTCTTTTCCAGGTGTTC | 7 | 2534 |
| 1270563 | N/A | N/A | 5609 | 5628 | GTTATACATTTAGGCTCTTT | 2 | 2535 |
| 1270564 | N/A | N/A | 5635 | 5654 | ATAATTTTCTTAGCTACTGC | 37 | 2536 |
| 1270565 | N/A | N/A | 5791 | 5810 | CTTTTCCTTTCAGATTTTTC | 28 | 2537 |
| 1270566 | N/A | N/A | 5853 | 5872 | TATATTCACCAAAGGAAAAT | 89 | 2538 |
| 1270567 | N/A | N/A | 6489 | 6508 | TATGTTATTATTGTTATTTG | 79 | 2539 |
| 1270568 | N/A | N/A | 7384 | 7403 | TAAGAACTTATCCCAAGGTT | 29 | 2540 |
| 1270569 | N/A | N/A | 9035 | 9054 | TGGATCTCTTAGATTTTTGG | 26 | 2541 |
| 1270570 | N/A | N/A | 9979 | 9998 | AGTATCAATTTAAGCAATTG | 51 | 2542 |
| 1270571 | N/A | N/A | 14378 | 14397 | ATTTCCTCTGTGCTTATTAT | 40 | 2543 |
| 1270572 | N/A | N/A | 15512 | 15531 | TATACCATGTACAGTTCAAT | 33 | 2544 |
| 1270573 | 426 | 445 | 16217 | 16236 | AGCCAAGGTTCGCCATAATG | 20* | 2545 |
| 1270574 | 1568 | 1587 | 17359 | 17378 | AGATAGGGCATTAGTATACT | 21 | 2546 |
| 1270575 | 1972 | 1991 | 17763 | 17782 | GAAAGGAATGCCACATATAG | 33 | 2547 |
| 1270576 | 2611 | 2630 | 18402 | 18421 | TCAGTGCACATTGTAAGCCT | 11 | 2548 |
| 1270577 | N/A | N/A | 6223 | 6242 | ATGTACAATCTGTTGTGGTT | 10 | 2549 |
| 1270578 | N/A | N/A | 7287 | 7306 | TGAAGCTTAATTAGTTACAT | 38 | 2550 |
| 1270579 | 1340 | 1359 | 17131 | 17150 | CTACTCTATGTTTTCCAGTG | 5 | 2551 |
| 1270580 | 1428 | 1447 | 17219 | 17238 | GTTATTTGCTGTTATACTTT | 5 | 2552 |
| 1270581 | 1461 | 1480 | 17252 | 17271 | CTAAGTCCAAAAATAAGTCC | 54 | 2553 |
| 1270582 | 1518 | 1537 | 17309 | 17328 | TCCAGGCAAAGGTATTTCAG | 28 | 2554 |
| 1270583 | 1624 | 1643 | 17415 | 17434 | TTGTCGGGTTTTCTTAAAAT | 47 | 2555 |
| 1270584 | 1828 | 1847 | 17619 | 17638 | CAGAGGTTCAGTGTTGTGAC | 5 | 2556 |
| 1270585 | 1857 | 1876 | 17648 | 17667 | TTATGTTCACTGTGAATATG | 31 | 2557 |
| 1270586 | 1883 | 1902 | 17674 | 17693 | CCAGAAGCCTTTCATATATG | 8 | 2558 |
| 1270587 | 1905 | 1924 | 17696 | 17715 | CCCAAACATTTGATTTCAAG | 67 | 2559 |
| 1270588 | 2083 | 2102 | 17874 | 17893 | TCCTGTATGTCAAAATCATT | 59 | 2560 |
| 1270589 | 2170 | 2189 | 17961 | 17980 | AAATGCAAGCAGTTCTTTTC | 44 | 2561 |
| 1270590 | 2424 | 2443 | 18215 | 18234 | GCAAGCCAATAATAACATTG | 9 | 2562 |
| 1270591 | 2578 | 2597 | 18369 | 18388 | AAGGGTTTCCCACATATTAA | 46 | 2563 |
| 1270592 | N/A | N/A | 4896 | 4915 | TTTTCCAGAAGTTTAACATA | 74 | 2564 |
| 1270593 | N/A | N/A | 5524 | 5543 | TCCATTGCAGGTAAGTTCTC | 28 | 2565 |
| 1270594 | N/A | N/A | 5606 | 5625 | ATACATTTAGGCTCTTTTCC | 22 | 2566 |
| 1270595 | N/A | N/A | 5617 | 5636 | GCCCTGGTGTTATACATTTA | 89 | 2567 |
| 1270596 | N/A | N/A | 5799 | 5818 | TTTCTGTGCTTTTCCTTTCA | 12 | 2568 |

TABLE 36
Reduction of PRNP RNA

| | SEQ ID | SEQ ID | SEQ ID | SEQ ID | | | |
|---|---|---|---|---|---|---|---|
| | NO: 1 | NO: 1 | NO: 2 | NO: 2 | | | |
| Compound | Start | Stop | Start | Stop | | PRNP | SEQ |
| ID | Site | Site | Site | Site | Sequence (5′ to 3′) | (% UTC) | ID NO |
| 1201142 | 1963 | 1982 | 17754 | 17773 | GCCACATATAGGGTCCTTTA | 6 | 66 |
| 1270597 | N/A | N/A | 5866 | 5885 | TTAGTGAGAGCAATATATTC | 63 | 2569 |
| 1270598 | N/A | N/A | 6497 | 6516 | ACTTCTGTTATGTTATTATT | 32 | 2570 |
| 1270599 | N/A | N/A | 6572 | 6591 | TGAAGTTCAGAGAATCTTTC | 110 | 2571 |
| 1270600 | N/A | N/A | 7392 | 7411 | AGAGCTAGTAAGAACTTATC | 49 | 2572 |
| 1270601 | N/A | N/A | 9043 | 9062 | GTTTGCTTTGGATCTCTTAG | 15 | 2573 |
| 1270602 | N/A | N/A | 9357 | 9376 | AGGGTGGTAGTTTTTCAAAT | 6 | 2574 |
| 1270603 | N/A | N/A | 9987 | 10006 | CAAGTGGGAGTATCAATTTA | 40 | 2575 |
| 1270604 | N/A | N/A | 15166 | 15185 | GGTTTTTGGAGGCTCTTTTA | 13 | 2576 |
| 1270605 | N/A | N/A | 15628 | 15647 | TGCTGGGATGATCTGCAATT | 69 | 2577 |
| 1270606 | 415 | 434 | N/A | N/A | GCCATAATGACTGCTCTGCC | 13* | 2578 |
| 1270607 | 1956 | 1975 | 17747 | 17766 | ATAGGGTCCTTTAAACATCT | 13 | 2579 |
| 1270608 | N/A | N/A | 6212 | 6231 | GTTGTGGTTCAGCTAAACTA | 66 | 2580 |
| 1270609 | N/A | N/A | 9022 | 9041 | TTTTTGGACGGGAGATTTAG | 73 | 2581 |
| 1270610 | N/A | N/A | 9684 | 9703 | TAATAGGTTAGGAAGAAAAG | 105 | 2582 |
| 1270611 | N/A | N/A | 9685 | 9704 | TTAATAGGTTAGGAAGAAAA | 88 | 2583 |
| 1270612 | 501 | 520 | 16292 | 16311 | ATCCTCCAGGCTTCGGGCGC | 16* | 2584 |
| 1270613 | 1417 | 1436 | 17208 | 17227 | TTATACTTTTACTGGCCTGG | 51 | 2585 |
| 1270614 | 1450 | 1469 | 17241 | 17260 | AATAAGTCCAGATTAACCAA | 57 | 2586 |
| 1270615 | 1507 | 1526 | 17298 | 17317 | GTATTTCAGACTGTTCTGAG | 4 | 2587 |
| 1270616 | 1806 | 1825 | 17597 | 17616 | TATTTACTCTTGTTGAACAG | 40 | 2588 |
| 1270617 | 1891 | 1910 | 17682 | 17701 | TTCAAGTCCCAGAAGCCTTT | 20 | 2589 |
| 1270618 | 1892 | 1911 | 17683 | 17702 | TTTCAAGTCCCAGAAGCCTT | 18 | 2590 |
| 1270619 | 1990 | 2009 | 17781 | 17800 | AATTACCTATAGTTTAAAGA | 65 | 2591 |
| 1270620 | 2063 | 2082 | 17854 | 17873 | CTGGTTTCCAGGTAAATGGA | 21 | 2592 |
| 1270621 | 2100 | 2119 | 17891 | 17910 | TTTCACAACTGCAGCTCTCC | 41 | 2593 |
| 1270622 | 2194 | 2213 | 17985 | 18004 | GACAATTATGAGACAGAAAT | 11 | 2594 |
| 1270623 | 2286 | 2305 | 18077 | 18096 | CTCCAACCTAAGATATTTTT | 38 | 2595 |
| 1270624 | 2413 | 2432 | 18204 | 18223 | ATAACATTGCAGAAAAGTAA | 79 | 2596 |
| 1270625 | N/A | N/A | 4996 | 5015 | TTTTTCACTGTAAGACCTTC | 38 | 2597 |
| 1270626 | N/A | N/A | 4997 | 5016 | TTTTTTCACTGTAAGACCTT | 72 | 2598 |
| 1270627 | N/A | N/A | 5069 | 5088 | CTTGTGTTAGATATAAATAA | 74 | 2599 |
| 1270628 | N/A | N/A | 5070 | 5089 | ACTTGTGTTAGATATAAATA | 75 | 2600 |
| 1270629 | N/A | N/A | 5528 | 5547 | TTCTTCCATTGCAGGTAAGT | 19 | 2601 |
| 1270630 | N/A | N/A | 5595 | 5614 | CTCTTTTCCAGGTGTTCTAA | 12 | 2602 |
| 1270631 | N/A | N/A | 5632 | 5651 | ATTTTCTTAGCTACTGCCCT | 42 | 2603 |
| 1270632 | N/A | N/A | 5660 | 5679 | TAATGTTCATTTCAGTTAAT | 58 | 2604 |
| 1270633 | N/A | N/A | 5709 | 5728 | TTTTCCCCACATATCACAGG | 39 | 2605 |
| 1270634 | N/A | N/A | 5850 | 5869 | ATTCACCAAAGGAAAATTAA | 58 | 2606 |
| 1270635 | N/A | N/A | 6561 | 6580 | GAATCTTTCACCTTGGTTTG | 41 | 2607 |
| 1270636 | N/A | N/A | 7381 | 7400 | GAACTTATCCCAAGGTTGTA | 55 | 2608 |
| 1270637 | N/A | N/A | 8154 | 8173 | TTCTATTTGTGTCTCCTTGA | 32 | 2609 |
| 1270638 | N/A | N/A | 9411 | 9430 | TTTTTTACCTGGAAAATCTC | 84 | 2610 |
| 1270639 | N/A | N/A | 9976 | 9995 | ATCAATTTAAGCAATTGTTA | 58 | 2611 |
| 1270640 | N/A | N/A | 14375 | 14394 | TCCTCTGTGCTTATTATTCA | 50 | 2612 |
| 1270641 | N/A | N/A | 15509 | 15528 | ACCATGTACAGTTCAATGGT | 79 | 2613 |
| 1270642 | 1571 | 1590 | 17362 | 17381 | CTAAGATAGGGCATTAGTAT | 30 | 2614 |
| 1270643 | 1975 | 1994 | 17766 | 17785 | AAAGAAAGGAATGCCACATA | 30 | 2615 |
| 1270644 | 2614 | 2633 | 18405 | 18424 | GATTCAGTGCACATTGTAAG | 10 | 2616 |
| 1270645 | N/A | N/A | 6226 | 6245 | GATATGTACAATCTGTTGTG | 22 | 2617 |
| 1270646 | N/A | N/A | 9698 | 9717 | ATCAGGAGCTCTATTAATAG | 39 | 2618 |
| 1270647 | N/A | N/A | 9699 | 9718 | AATCAGGAGCTCTATTAATA | 55 | 2619 |
| 1270648 | 519 | 538 | 16310 | 16329 | GGCTGCCCCCAGTGTTCCAT | 27* | 2620 |
| 1270649 | 520 | 539 | 16311 | 16330 | CGGCTGCCCCCAGTGTTCCA | 36* | 2621 |
| 1270650 | 1343 | 1362 | 17134 | 17153 | GGTCTACTCTATGTTTTCCA | 51 | 2622 |
| 1270651 | 1431 | 1450 | 17222 | 17241 | ATGGTTATTTGCTGTTATAC | 8 | 2623 |
| 1270652 | 1627 | 1646 | 17418 | 17437 | ATGTTGTCGGGTTTTCTTAA | 3 | 2624 |
| 1270653 | 1831 | 1850 | 17622 | 17641 | AGCCAGAGGTTCAGTGTTGT | 32 | 2625 |
| 1270654 | 1908 | 1927 | 17699 | 17718 | ATTCCCAAACATTTGATTTC | 83 | 2626 |
| 1270655 | 2086 | 2105 | 17877 | 17896 | CTCTCCTGTATGTCAAAATC | 66 | 2627 |
| 1270656 | 2114 | 2133 | 17905 | 17924 | TATGATGATGGTGCTTTCAC | 11 | 2628 |
| 1270657 | 2208 | 2227 | 17999 | 18018 | TAATTCTGGTTTTTGACAAT | 47 | 2629 |
| 1270658 | 2271 | 2290 | 18062 | 18081 | TTTTTTAGATTGTCTCCCTA | 56 | 2630 |
| 1270659 | 2581 | 2600 | 18372 | 18391 | CAAAAGGGTTTCCCACATAT | 27 | 2631 |
| 1270660 | N/A | N/A | 4947 | 4966 | TTCCACTGGTGATTTTTTCC | 35 | 2632 |
| 1270661 | N/A | N/A | 4948 | 4967 | TTTCCACTGGTGATTTTTTC | 52 | 2633 |
| 1270662 | N/A | N/A | 5012 | 5031 | CCTTACTGGTTAGCTTTTTT | 40 | 2634 |
| 1270663 | N/A | N/A | 5013 | 5032 | CCCTTACTGGTTAGCTTTTT | 49 | 2635 |
| 1270664 | N/A | N/A | 5083 | 5102 | TTCGGTGTGGAAGACTTGTG | 37 | 2636 |
| 1270665 | N/A | N/A | 5084 | 5103 | TTTCGGTGTGGAAGACTTGT | 41 | 2637 |
| 1270666 | N/A | N/A | 5527 | 5546 | TCTTCCATTGCAGGTAAGTT | 34 | 2638 |
| 1270667 | N/A | N/A | 5620 | 5639 | ACTGCCCTGGTGTTATACAT | 61 | 2639 |
| 1270668 | N/A | N/A | 5646 | 5665 | GTTAATGTGTCATAATTTTC | 23 | 2640 |
| 1270669 | N/A | N/A | 5675 | 5694 | TTTTTAGTGGTTACATAATG | 59 | 2641 |
| 1270670 | N/A | N/A | 5676 | 5695 | ATTTTTAGTGGTTACATAAT | 55 | 2642 |
| 1270671 | N/A | N/A | 5723 | 5742 | TTTTACTTGTCAGTTTTTCC | 16 | 2643 |
| 1270672 | N/A | N/A | 5724 | 5743 | TTTTTACTTGTCAGTTTTTC | 33 | 2644 |
| 1270673 | N/A | N/A | 5789 | 5808 | TTTCCTTTCAGATTTTTCAC | 47 | 2645 |

### Example 3: Effect of Modified Oligonucleotides on Human PRNP RNA In Vitro, Multiple Doses

[0533] Modified oligonucleotides selected from the examples above were tested at various doses in A-431 cells. Cells were plated at a density of 10,000 cells per well and treated with modified oligonucleotide at various doses by free uptake, as specified in the tables below. After a treatment period of approximately 48 hours, total RNA was isolated from the cells and PRNP RNA levels were measured by quantitative real-time PCR using primer probe set RTS42354 as described in Example 1. PRNP RNA levels were normalized with RIBOGREENK® Results are presented in the tables below as percent PRNP RNA relative to untreated control cells (UTC). The halfmaximal inhibitory concentration (IC₅₀) of each modified oligonucleotide is also presented. IC₅₀ was calculated using a linear regression on a log/linear plot of the data in Excel. The modified oligonucleotides marked with an asterisk (*) are complementary to the amplicon region of the primer probe set. Additional assays may be used to measure the potency and efficacy of the modified oligonucleotides complementary to the amplicon region.

TABLE 37
Dose-dependent reduction of human
PRNP RNA expression in A-431 cells

| Compound | % UTC | | | | | IC50 |
|---|---|---|---|---|---|---|
| ID | 23 nM | 94 nM | 375 nM | 1500 nM | 6000 nM | (μM) |
| 1201120 | 98 | 51 | 18 | 6 | 2 | 0.2 |
| 1201138 | 98 | 93 | 36 | 19 | 15 | 0.4 |
| 1201142 | 84 | 58 | 30 | 13 | 8 | 0.2 |
| 1201145 | 92 | 88 | 70 | 34 | 13 | 0.7 |
| 1201154 | 68 | 42 | 19 | 7 | 4 | 0.1 |
| 1201255 | 64 | 55 | 31 | 15 | 8 | 0.1 |
| 1201276 | 75 | 46 | 15 | 5 | 3 | 0.1 |
| 1201288 | 101 | 62 | 31 | 22 | 13 | 0.3 |
| 1201293 | 80 | 57 | 21 | 7 | 4 | 0.1 |
| 1201294 | 84 | 64 | 37 | 19 | 11 | 0.2 |
| 1238797 | 100 | 77 | 45 | 27 | 14 | 0.4 |
| 1238863 | 64 | 38 | 8 | 2 | 1 | 0.04 |
| 1238864 | 74 | 27 | 8 | 3 | 1 | 0.04 |
| 1238995 | 103 | 59 | 32 | 21 | 11 | 0.3 |
| 1200977* | 92 | 68 | 46 | 27 | 21 | 0.4 |

TABLE 38
Dose-dependent reduction of human
PRNP RNA expression in A-431 cells

| Compound | % UTC | | | | | IC50 |
|---|---|---|---|---|---|---|
| ID | 23 nM | 94 nM | 375 nM | 1500 nM | 6000 nM | (μM) |
| 1201142 | 82 | 58 | 30 | 13 | 7 | 0.2 |
| 1238270 | 77 | 57 | 30 | 12 | 8 | 0.1 |
| 1238359 | 83 | 57 | 31 | 12 | 4 | 0.2 |
| 1238360 | 102 | 65 | 41 | 22 | 13 | 0.4 |
| 1238490 | 79 | 53 | 36 | 12 | 7 | 0.1 |
| 1238491 | 95 | 77 | 46 | 41 | 17 | 0.5 |
| 1238600 | 93 | 76 | 55 | 29 | 16 | 0.5 |
| 1238645 | 92 | 65 | 57 | 32 | 20 | 0.5 |
| 1238688 | 87 | 81 | 96 | 32 | 31 | 1.4 |
| 1238974 | 50 | 48 | 17 | 8 | 4 | <0.02 |
| 1238975 | 82 | 67 | 41 | 22 | 11 | 0.3 |
| 1239062 | 87 | 76 | 56 | 28 | 13 | 0.4 |
| 1239063 | 179 | 72 | 37 | 16 | 5 | 0.6 |
| 1239064 | 96 | 95 | 59 | 27 | 10 | 0.6 |
| 1239260 | 98 | 79 | 56 | 35 | 26 | 0.7 |

TABLE 39
Dose-dependent reduction of human
PRNP RNA expression in A-431 cells

| Compound | % UTC | | | | | IC50 |
|---|---|---|---|---|---|---|
| ID | 23 nM | 94 nM | 375 nM | 1500 nM | 6000 nM | (μM) |
| 1201142 | 84 | 56 | 26 | 11 | 8 | 0.1 |
| 1238341 | 72 | 46 | 15 | 4 | 2 | 0.1 |
| 1238404 | 94 | 80 | 58 | 37 | 21 | 0.7 |
| 1238517 | 81 | 44 | 16 | 6 | 3 | 0.1 |
| 1238582 | 95 | 67 | 54 | 33 | 23 | 0.5 |
| 1238802 | 98 | 71 | 46 | 17 | 6 | 0.3 |
| 1238892 | 104 | 101 | 74 | 49 | 36 | 2 |
| 1238914 | 97 | 86 | 72 | 36 | 13 | 0.7 |
| 1239045 | 82 | 75 | 38 | 18 | 9 | 0.3 |
| 1239046 | 91 | 65 | 50 | 25 | 13 | 0.3 |
| 1239066 | 81 | 79 | 48 | 20 | 10 | 0.3 |
| 1239352 | 94 | 71 | 37 | 16 | 7 | 0.3 |
| 1239394 | 88 | 86 | 44 | 28 | 15 | 0.4 |
| 1239550 | 87 | 85 | 69 | 53 | 39 | 2.2 |
| 1239682 | 108 | 58 | 34 | 13 | 5 | 0.3 |

TABLE 40
Dose-dependent reduction of human
PRNP RNA expression in A-431 cells

| Compound | % UTC | | | | | IC50 |
|---|---|---|---|---|---|---|
| ID | 23 nM | 94 nM | 375 nM | 1500 nM | 6000 nM | (μM) |
| 1201142 | 83 | 55 | 23 | 17 | 7 | 0.1 |
| 1238167* | 63 | 41 | 18 | 13 | 9 | 0.04 |
| 1238168* | 72 | 44 | 17 | 17 | 12 | 0.1 |
| 1238169* | 76 | 41 | 21 | 17 | 11 | 0.1 |
| 1238170* | 69 | 35 | 18 | 10 | 8 | 0.05 |
| 1238255 | 91 | 59 | 29 | 15 | 9 | 0.2 |
| 1238322 | 67 | 31 | 9 | 4 | 1 | 0.03 |
| 1238324 | 91 | 69 | 32 | 13 | 5 | 0.2 |
| 1238409 | 72 | 61 | 40 | 14 | 8 | 0.2 |
| 1238410 | 87 | 67 | 33 | 18 | 8 | 0.2 |
| 1238497 | 86 | 65 | 31 | 14 | 8 | 0.2 |
| 1238498 | 81 | 65 | 34 | 16 | 9 | 0.2 |
| 1238500 | 82 | 36 | 15 | 5 | 2 | 0.1 |
| 1238805 | 85 | 58 | 30 | 12 | 5 | 0.2 |
| 1239027 | 67 | 60 | 33 | 17 | 13 | 0.1 |

TABLE 41
Dose-dependent reduction of human
PRNP RNA expression in A-431 cells

| Compound | % UTC | | | | | IC50 |
|---|---|---|---|---|---|---|
| ID | 23 nM | 94 nM | 375 nM | 1500 nM | 6000 nM | (μM) |
| 1201142 | 87 | 61 | 25 | 14 | 9 | 0.2 |
| 1238259 | 86 | 59 | 26 | 9 | 3 | 0.2 |
| 1238325 | 56 | 40 | 17 | 6 | 2 | 0.03 |
| 1238327 | 72 | 51 | 22 | 8 | 4 | 0.1 |
| 1238370 | 84 | 54 | 24 | 9 | 2 | 0.1 |
| 1238371 | 93 | 80 | 43 | 17 | 8 | 0.3 |
| 1238437 | 88 | 79 | 36 | 20 | 11 | 0.3 |
| 1238501 | 71 | 36 | 17 | 7 | 3 | 0.1 |
| 1238502 | 91 | 62 | 32 | 16 | 8 | 0.2 |
| 1239009 | 71 | 39 | 16 | 5 | 3 | 0.1 |
| 1239028 | 77 | 66 | 44 | 29 | 17 | 0.3 |
| 1239052 | 89 | 54 | 34 | 19 | 12 | 0.2 |
| 1239162 | 89 | 73 | 47 | 34 | 15 | 0.4 |
| 1239250 | 89 | 64 | 38 | 24 | 16 | 0.3 |
| 1239448 | 76 | 44 | 25 | 9 | 5 | 0.1 |

TABLE 42
Dose-dependent reduction of human
PRNP RNA expression in A-431 cells

| Compound | % UTC | | | | | IC50 |
|---|---|---|---|---|---|---|
| ID | 23 nM | 94 nM | 375 nM | 1500 nM | 6000 nM | (μM) |
| 1201142 | 90 | 52 | 33 | 12 | 8 | 0.2 |
| 1238285 | 97 | 84 | 55 | 36 | 14 | 0.6 |
| 1238329 | 90 | 49 | 25 | 12 | 6 | 0.1 |
| 1238373 | 75 | 60 | 11 | 9 | 4 | 0.1 |
| 1238440 | 74 | 61 | 26 | 12 | 8 | 0.1 |
| 1238460 | 85 | 77 | 46 | 30 | 13 | 0.4 |
| 1238572 | 96 | 82 | 60 | 39 | 29 | 0.9 |
| 1238812 | 100 | 51 | 34 | 11 | 6 | 0.2 |
| 1238813 | 88 | 64 | 41 | 21 | 17 | 0.3 |
| 1238835 | 109 | 80 | 43 | 20 | 8 | 0.4 |
| 1238836 | 78 | 61 | 35 | 11 | 6 | 0.2 |
| 1238990 | 81 | 62 | 33 | 15 | 7 | 0.2 |
| 1239010 | 76 | 38 | 15 | 6 | 1 | 0.1 |
| 1239011 | 97 | 68 | 36 | 16 | 7 | 0.3 |
| 1239231 | 85 | 96 | 76 | 52 | 30 | 1.8 |

TABLE 43
Dose-dependent reduction of human
PRNP RNA expression in A-431 cells

| | % UTC | | | | | | |
|---|---|---|---|---|---|---|---|
| Compound | 6 | 23 | 94 | 375 | 1500 | 6000 | IC50 |
| ID | nM | nM | nM | nM | nM | nM | (μM) |
| 1201142 | 94 | 97 | 62 | 27 | 14 | 7 | 0.2 |
| 1238244 | 92 | 106 | 61 | 31 | 15 | 12 | 0.2 |
| 1238331 | 107 | 116 | 64 | 28 | 14 | 8 | 0.3 |
| 1238507 | 92 | 66 | 39 | 25 | 9 | 5 | 0.1 |
| 1238616 | 109 | 91 | 70 | 56 | 35 | 29 | 0.7 |
| 1238837 | 90 | 70 | 50 | 15 | 9 | 4 | 0.1 |
| 1238838 | 88 | 92 | 53 | 31 | 18 | 9 | 0.2 |
| 1239146 | 109 | 100 | 61 | 44 | 23 | 11 | 0.3 |
| 1239607 | 97 | 86 | 66 | 39 | 23 | 18 | 0.3 |
| 1239694 | 110 | 108 | 84 | 76 | 48 | 28 | 1.5 |

TABLE 44
Dose-dependent reduction of human
PRNP RNA expression in A-431 cells

| | % UTC | | | | | | |
|---|---|---|---|---|---|---|---|
| Compound | 6 | 23 | 94 | 375 | 1500 | 6000 | IC50 |
| ID | nM | nM | nM | nM | nM | nM | (μM) |
| 1201142 | 105 | 98 | 69 | 27 | 20 | 10 | 0.3 |
| 1238361 | 88 | 86 | 86 | 53 | 31 | 20 | 0.5 |
| 1238444 | 107 | 96 | 83 | 51 | 39 | 21 | 0.6 |
| 1238554 | 96 | 91 | 85 | 67 | 44 | 31 | 1.3 |
| 1238889 | 99 | 85 | 88 | 61 | 59 | 39 | 2.6 |
| 1238992 | 84 | 101 | 73 | 51 | 31 | 20 | 0.5 |
| 1239263 | 89 | 100 | 92 | 69 | 48 | 32 | 1.8 |
| 1239329 | 106 | 96 | 80 | 47 | 39 | 31 | 0.8 |
| 1239345 | 120 | 113 | 90 | 49 | 30 | 19 | 0.6 |

### Example 4: Design and Synthesis of MOE Gapmer Modified Oligonucleotides Complementary to a Human PRNP Nucleic Acid

[0534] Modified oligonucleotides complementary to human PRNP nucleic acid were designed and synthesized. “Start site” indicates the 5′-most nucleoside to which the gapmer is complementary to in the human gene sequence. “Stop site” indicates the 3′-most nucleoside to which the gapmer is complementary to in the human gene sequence. Most of the modified oligonucleotides listed in the Tables below are complementary to the human PRNP mRNA sequence, designated herein as SEQ ID NO: 1 (described here in above) and/or the human PRNP genomic sequence, designated herein as SEQ ID NO: 2 (described herein above). In addition, certain modified oligonucleotides are complementary to the human PRNP mRNA designated herein as SEQ ID NO: 4 (ENSEMBL Accession NO: ENST00000424424.1). ‘N/A’ indicates that the modified oligonucleotide is not complementary to that particular gene sequence with 100% complementarity.

[0535] The modified oligonucleotides in the table below are 3-10-7 MOE gapmers with mixed PO/PS internucleoside linkages. The gapmers are 20 nucleosides in length and have a central gap segment that consists of ten 2′-β-D-deoxynucleosides, a 5′ wing segment that consists of three 2′-MOE nucleosides, and a 3′ wing segment that consists of seven 2′-MOE nucleosides. The sugar motif of the gapmers is (from 5′ to 3′): eeeddddddddddeeeeeee; wherein ‘d’ represents a 2′-β-D-deoxyribosyl sugar, and ‘e’ represents a 2′-MOE modified ribosyl sugar. The gapmers have an internucleoside linkage motif of (from 5′ to 3′): soossssssssssooooss; wherein each “s” represents a phosphorothioate internucleoside linkage and each “o” represents a phosphodiester internucleoside linkage. Each cytosine nucleoside is a 5-methyl cytosine.

TABLE 45
3-10-7 MOE gapmers with mixed PO/PS internucleoside linkages
complementary to human PRNP

| | | | SEQ | | | |
|---|---|---|---|---|---|---|
| | | SEQ ID | ID | SEQ ID | SEQ ID | |
| | | NO: 1 | NO: 1 | NO: 2 | NO: 2 | SEQ |
| Compound | | Start | Stop | Start | Start | ID |
| Number | Sequence (5′ to 3′) | Site | Site | Site | Site | NO. |
| 1373041 | GTCAGTTTTTCCCCACATAT | N/A | N/A | 5715 | 5734 | 2304 |
| 1373042 | ACTCTATGTTTTCCAGTGCC | 1338 | 1357 | 17129 | 17148 | 2264 |
| 1373043 | CTCTATGTTTTCCAGTGCCC | 1337 | 1356 | 17128 | 17147 | 2191 |
| 1373044 | CTATGTTTTCCAGTGCCCAT | 1335 | 1354 | 17126 | 17145 | 2190 |
| 1393331 | ACTGAATTTTCTCTCCCAGC | N/A | N/A | 14923 | 14942 | 2646 |
| 1393332 | GCCACATATAGGGTCCTTTA | 1963 | 1982 | 17754 | 17773 | 66 |
| 1411007 | CGTCCATTTTCTGTGCTTTT | N/A | N/A | 5806 | 5825 | 2647 |

[0536] The modified oligonucleotides in the table below are 4-10-6 MOE gapmers with mixed PO/PS internucleoside linkages. The gapmers are 20 nucleosides in length and have a central gap segment that consists of ten 2′-β-D-deoxynucleosides, a 5′ wing segment that consists of four 2′-MOE nucleosides, and a 3′ wing segment that consists of six 2′-MOE nucleosides. The sugar motif of the gapmers is (from 5′ to 3′): eeeeddddddddddeeeeee; wherein ‘d’ represents a 2′-β-D-deoxyribosyl sugar, and ‘e’ represents a 2′-MOE modified ribosyl sugar. The gapmers have an internucleoside linkage motif of (from 5′ to 3′): sooossssssssssoooss; wherein each “s” represents a phosphorothioate internucleoside linkage and each “o” represents a phosphodiester internucleoside linkage. Each cytosine nucleoside is a 5-methyl cytosine.

TABLE 46
4-10-6 MOE gapmers with mixed PO/PS internucleoside linkages
complementary to human PRNP

| | | SEQ | SEQ | SEQ | SEQ | |
|---|---|---|---|---|---|---|
| | | ID | ID | ID | ID | |
| | | NO: 1 | NO: 1 | NO: 2 | NO: 2 | SEQ |
| Compound | | Start | Stop | Start | Start | ID |
| Number | Sequence (5′ to 3′) | Site | Site | Site | Site | NO. |
| 1373029 | CTATGTTTTCCAGTGCCCAT | 1335 | 1354 | 17126 | 17145 | 2190 |
| 1373030 | ACTCTATGTTTTCCAGTGCC | 1338 | 1357 | 17129 | 17148 | 2264 |
| 1373031 | GCTTATTATTCATGTTCTCC | N/A | N/A | 14367 | 14386 | 1939 |
| 1373032 | GTCATAATTTTCTTAGCTAC | N/A | N/A | 5638 | 5657 | 1914 |
| 1373033 | GCTTACTCGGCTTGTTCCAC | 723 | 742 | 16514 | 16533 | 351 |
| 1373034 | GTGTCATAATTTTCTTAGCT | N/A | N/A | 5640 | 5659 | 2302 |
| 1373035 | GCACACTGACCATTTTTTAA | 2147 | 2166 | 17938 | 17957 | 584 |
| 1373036 | TCTATGTTTTCCAGTGCCCA | 1336 | 1355 | 17127 | 17146 | 1726 |
| 1373037 | CTCTATGTTTTCCAGTGCCC | 1337 | 1356 | 17128 | 17147 | 2191 |
| 1373038 | GTCAGTTTTTCCCCACATAT | N/A | N/A | 5715 | 5734 | 2304 |
| 1373039 | ACTTGTCAGTTTTTCCCCAC | N/A | N/A | 5719 | 5738 | 1301 |
| 1373040 | TGTCAGTTTTTCCCCACATA | N/A | N/A | 5716 | 5735 | 1070 |
| 1373078 | GCCACATATAGGGTCCTTTA | 1963 | 1982 | 17754 | 17773 | 66 |
| 1393327 | ACTGAATTTTCTCTCCCAGC | N/A | N/A | 14923 | 14942 | 2646 |
| 1411005 | CGTCCATTTTCTGTGCTTTT | N/A | N/A | 5806 | 5825 | 2647 |

[0537] The modified oligonucleotides in Table 47 and 48 below are 5-10-5 MOE gapmers with mixed PO/PS internucleoside linkages. The gapmers are 20 nucleosides in length and have a central gap segment that consists of ten 2′-β-D-deoxynucleosides, a 5′ wing segment that consists of five 2′-MOE nucleosides, and a 3′ wing segment that consists of five 2′-MOE nucleosides. The sugar motif of the gapmers is (from 5′ to 3′): eeeeeddddddddddeeeee; wherein ‘d’ represents a 2′-β-D-deoxyribosyl sugar, and ‘e’ represents a 2′-MOE modified ribosyl sugar. The gapmers have an internucleoside linkage motif of (from 5′ to 3′): sooosssssssssssooss; wherein each “s” represents a phosphorothioate internucleoside linkage and each “o” represents a phosphodiester internucleoside linkage. Each cytosine nucleoside is a 5-methyl cytosine.

TABLE 47
5-10-5 MOE gapmers with mixed PO/PS internucleoside linkages complementary to
human PRNP

| | | SEQ | SEQ | SEQ | SEQ | |
|---|---|---|---|---|---|---|
| | | ID | ID | ID | ID | |
| | | NO: 1 | NO: 1 | NO: 2 | NO: 2 | SEQ |
| Compound | | Start | Stop | Start | Start | ID |
| Number | Sequence (5′ to 3′) | Site | Site | Site | Site | NO. |
| 1355702 | CATAATGACTGCTCTGCAAA | N/A | N/A | 16204 | 16223 | 2651 |
| 1355704 | CCATAATGACTGCTCTGCAA | N/A | N/A | 16205 | 16224 | 2653 |
| 1355710 | ATTAGTGTGATCATGCACAT | N/A | N/A | 13535 | 13554 | 2655 |
| 1355711 | ACAGCCATGTTCAGTGTCAG | N/A | N/A | 6529 | 6548 | 2656 |
| 1355712 | TTGATTGTGATATTGACGCA | 964 | 983 | 16755 | 16774 | 2657 |
| 1355713 | CATGTTTTCACGATAGTAAC | 872 | 891 | 16663 | 16682 | 2658 |
| 1355714 | TATTCATGTTCTCCACGGGA | N/A | N/A | 14361 | 14380 | 2659 |
| 1355715 | AAAATGTTTGTCACTGGTTC | N/A | N/A | 5444 | 5463 | 2660 |
| 1355716 | AGAAGATAATCAAGGGTGCA | N/A | N/A | 7571 | 7590 | 2661 |
| 1355717 | ATCCTGATGTCAAAGTCCCA | N/A | N/A | 8742 | 8761 | 2662 |
| 1355718 | AGGTGCTGTCCAAGGCCATA | N/A | N/A | 13615 | 13634 | 2663 |
| 1355719 | TTAGTCTTGTCCTCAGTGCT | N/A | N/A | 15644 | 15663 | 2664 |
| 1355720 | CGTCCATTTTCTGTGCTTTT | N/A | N/A | 5806 | 5825 | 2647 |
| 1355721 | ACTGAATTTTCTCTCCCAGC | N/A | N/A | 14923 | 14942 | 2646 |
| 1355722 | TGGTTGCTGTACTCATCCAT | 925 | 944 | 16716 | 16735 | 2665 |
| 1355723 | GCATGTTTTCACGATAGTAA | 873 | 892 | 16664 | 16683 | 2666 |
| 1355724 | AACTGTGGGTCCATTTCATC | N/A | N/A | 5924 | 5943 | 2667 |
| 1355725 | TGACCATCTTATTCGGTGCT | N/A | N/A | 14820 | 14839 | 2668 |
| 1355726 | TCTATGGAATCTGTAGGTCA | N/A | N/A | 8234 | 8253 | 2669 |
| 1355727 | CAATTAGTGTGATCATGCAC | N/A | N/A | 13537 | 13556 | 2670 |
| 1355728 | TTTTCTGTGACATTTGGTGA | N/A | N/A | 628 | 6300 | 2671 |
| 1355729 | GCTTCCATCACTTCTCACCT | N/A | N/A | 14803 | 14822 | 2672 |
| 1355730 | TTTCTGTGACATTTGGTGAC | N/A | N/A | 6280 | 6299 | 2673 |
| 1355731 | GACAGCCATGTTCAGTGTCA | N/A | N/A | 6530 | 6549 | 2674 |
| 1355732 | GGTTTCTGGGTCACAGCTTC | N/A | N/A | 5496 | 5515 | 2675 |
| 1355733 | AAGGTGCTGTCCAAGGCCAT | N/A | N/A | 13616 | 13635 | 2676 |
| 1355734 | TTCCTCTGTGCTTATTATTC | N/A | N/A | 14376 | 14395 | 2677 |
| 1355735 | GGTTGTTCTATAAATTCATC | N/A | N/A | 9441 | 9460 | 2678 |
| 1355736 | ACATTTATTTCATGTGCCAG | N/A | N/A | 14088 | 14107 | 2679 |
| 1355737 | CAAGGTGCTGTCCAAGGCCA | N/A | N/A | 13617 | 13636 | 2680 |
| 1355738 | CTGAAGTTAGTCTTGTCCTC | N/A | N/A | 15650 | 15669 | 2681 |
| 1355739 | GTTAGTCTTGTCCTCAGTGC | N/A | N/A | 15645 | 15664 | 2682 |
| 1355740 | CTCAAGGTGCTGTCCAAGGC | N/A | N/A | 13619 | 13638 | 2683 |
| 1355741 | TTAGTGTGATCATGCACATA | N/A | N/A | 13534 | 13553 | 2684 |
| 1355742 | CATTTATTTCATGTGCCAGC | N/A | N/A | 14087 | 14106 | 2685 |
| 1355743 | AAGTTAGTCTTGTCCTCAGT | N/A | N/A | 15647 | 15666 | 2686 |
| 1355744 | CCCCACATATCACAGGCTCC | N/A | N/A | 5705 | 5724 | 2687 |
| 1355745 | CTTTCCTGATAGTTCACTGT | N/A | N/A | 8019 | 8038 | 2688 |
| 1355746 | AGATTCTTGTTCAGCACGAT | N/A | N/A | 12108 | 12127 | 2689 |
| 1355747 | CGGTGCATGTTTTCACGATA | 877 | 896 | 16668 | 16687 | 2690 |
| 1355748 | TTGACAGCCATGTTCAGTGT | N/A | N/A | 6532 | 6551 | 2691 |
| 1355749 | GTGCATGTTTTCACGATAGT | 875 | 894 | 16666 | 16685 | 2692 |
| 1355750 | TGCTTCCATCACTTCTCACC | N/A | N/A | 14804 | 14823 | 2693 |
| 1355751 | TTTCTAGAACTTGCAAGGAA | N/A | N/A | 12006 | 12025 | 2694 |
| 1355752 | CCTGATAGTTCACTGTTGGC | N/A | N/A | 8015 | 8034 | 2695 |
| 1355753 | TCTATTTGTGTCTCCTTGAA | N/A | N/A | 8153 | 8172 | 2696 |
| 1355754 | TTCTTAGCTACTGCCCTGGT | N/A | N/A | 5629 | 5648 | 2697 |
| 1355755 | TTTTTAGATTGTCTCCCTAT | 2270 | 2289 | 18061 | 18080 | 2698 |
| 1355756 | ATTTTTCCAACATGACCATC | N/A | N/A | 14832 | 14851 | 2699 |
| 1355757 | CACAACTGCAGCTCTCCTGT | 2097 | 2116 | 17888 | 17907 | 2700 |
| 1394116 | GCTCCTCAAACTGACAAGCC | N/A | N/A | 14590 | 14609 | 2701 |
| 1394117 | TTGCTCCTTTCCACTGGTGA | N/A | N/A | 4955 | 4974 | 2702 |
| 1394118 | GCACCTTCTCCATTCGCTGC | N/A | N/A | 14977 | 14996 | 2703 |
| 1394119 | GGTGCTTCCATCACTTCTCA | N/A | N/A | 14806 | 14825 | 2704 |
| 1394120 | GCTCATGGCACTTCCCAGCA | 815 | 834 | 16606 | 16625 | 2705 |
| 1394121 | GCCACCTTCACCCAATTTTA | N/A | N/A | 8306 | 8325 | 2706 |
| 1394122 | GAGCCTGCATCCCAAGAGCT | 1707 | 1726 | 17498 | 17517 | 2707 |
| 1394123 | GGGCACCATCCCCTCAGTCA | N/A | N/A | 15028 | 15047 | 2708 |
| 1394124 | GCTTGACCAGCATCTCAGGT | 1360 | 1379 | 17151 | 17170 | 2709 |
| 1394125 | CTGTAGCCATCACTGGGTTA | N/A | N/A | 6702 | 6721 | 2710 |
| 1394126 | CTGACAAGCCCATCCTGTCT | N/A | N/A | 14580 | 14599 | 2711 |
| 1394127 | TCCTCATCCCACTATCAGGA | 1175 | 1194 | 16966 | 16985 | 2712 |
| 1394128 | CCTCCATTCTATGAATGGAC | N/A | N/A | 5373 | 5392 | 2713 |
| 1394129 | CCCCCAATAACTCATACATA | N/A | N/A | 5418 | 5437 | 2714 |
| 1394130 | CGGTGCTTCCATCACTTCTC | N/A | N/A | 14807 | 14826 | 2715 |
| 1394131 | TCTCAGGTCTACTCTATGTT | 1348 | 1367 | 17139 | 17158 | 2716 |
| 1394132 | GTTCAGGCCTCCCACTGCTC | N/A | N/A | 14606 | 14625 | 2717 |
| 1394133 | CCAAGAGCTAAGAATCTCTA | 1696 | 1715 | 17487 | 17506 | 2718 |
| 1394134 | GTGAACAATAATCTATTGCT | N/A | N/A | 9473 | 9492 | 2719 |
| 1394135 | CTGTACTCATCCATGGGCCT | 919 | 938 | 16710 | 16729 | 2720 |
| 1394136 | GTGACTTTCAACCTTCCTAA | N/A | N/A | 6265 | 6284 | 2721 |
| 1394137 | TCAGGTCTACTCTATGTTTT | 1346 | 1365 | 17137 | 17156 | 2722 |
| 1394138 | CTCAGGTCTACTCTATGTTT | 1347 | 1366 | 17138 | 17157 | 2723 |
| 1394139 | TTCCAGCTTCTTAATGCATC | N/A | N/A | 5479 | 5498 | 2724 |
| 1406230 | CTCCTTGAATTTCTTTCATC | N/A | N/A | 8142 | 8161 | 2725 |
| 1406232 | GCTTCTCAATTTTTCCAACA | N/A | N/A | 14840 | 14859 | 2726 |
| 1406236 | TCTTTCTAATTTTGTACACA | N/A | N/A | 7713 | 7732 | 2727 |
| 1406238 | GTTGTTCTATAAATTCATCT | N/A | N/A | 9440 | 9459 | 2728 |
| 1406243 | TCCTTGAATTTCTTTCATCA | N/A | N/A | 8141 | 8160 | 2729 |
| 1406250 | CCATTTTTTAATTACATCAT | 2138 | 2157 | 17929 | 17948 | 2730 |
| 1406254 | TCTCCTTGAATTTCTTTCAT | N/A | N/A | 8143 | 8162 | 2731 |
| 1406261 | TCTGAGATTTGTTTTAGCCT | 1493 | 1512 | 17284 | 17303 | 2732 |
| 1406262 | CAATTGTTTTTCTCTCTCTC | N/A | N/A | 15613 | 15632 | 2733 |
| 1406264 | TCTCAATTTTTTGAGAAGTT | N/A | N/A | 13161 | 13180 | 2734 |
| 1406267 | TCTCAATTTTTCCAACATGA | N/A | N/A | 14837 | 14856 | 2735 |
| 1411013 | CCATTTTCTGTGCTTTTCCT | N/A | N/A | 5803 | 5822 | 2736 |
| 1411014 | TCCATTTTCTGTGCTTTTCC | N/A | N/A | 5804 | 5823 | 2737 |
| 1411015 | GTCCATTTTCTGTGCTTTTC | N/A | N/A | 5805 | 5824 | 2738 |
| 1411016 | ACGTCCATTTTCTGTGCTTT | N/A | N/A | 5807 | 5826 | 2739 |
| 1411017 | AACGTCCATTTTCTGTGCTT | N/A | N/A | 5808 | 5827 | 2740 |
| 1411018 | AAACGTCCATTTTCTGTGCT | N/A | N/A | 5809 | 5828 | 2741 |

TABLE 48
5-10-5 MOE gapmers with mixed PO/PS internucleoside linkages complementary
to human PRNP

| Compound | | SEQ ID NO: 4 | SEQ ID NO: 4 | |
|---|---|---|---|---|
| Number | Sequence (5′ to 3′) | Start Site | Stop Site | SEQ ID NO. |
| 1355700 | ATAATGACTGCCTCGGTCGT | 42 | 61 | 2649 |
| 1355701 | CCATAATGACTGCCTCGGTC | 44 | 63 | 2650 |
| 1355703 | TTCGCCATAATGACTGCCTC | 48 | 67 | 2652 |
| 1355705 | GTTCGCCATAATGACTGCCT | 49 | 68 | 2654 |

[0538] The modified oligonucleotides in the table below are 6-10-4 MOE gapmers with mixed PO/PS internucleoside linkages. The gapmers are 20 nucleosides in length and have a central gap segment that consists of ten 2′-β-D-deoxynucleosides, a 5′ wing segment that consists of six 2′-MOE nucleosides, and a 3′ wing segment that consists of four 2′-MOE nucleosides. The sugar motif of the gapmers is (from 5′ to 3′): eeeeeeddddddddddeeee; wherein ‘d’ represents a 2′-β-D-deoxyribosyl sugar, and ‘e’ represents a 2′-MOE modified ribosyl sugar. The gapmers have an internucleoside linkage motif of (from 5′ to 3′): sooooossssssssssoss; wherein each “s” represents a phosphorothioate internucleoside linkage and each “o” represents a phosphodiester internucleoside linkage. Each cytosine nucleoside is a 5-methyl cytosine.

TABLE 49
6-10-4 MOE gapmers with mixed PO/PS internucleoside linkages complementary to
human PRNP

| | | SEQ | SEQ | SEQ | SEQ | |
|---|---|---|---|---|---|---|
| | | ID | ID | ID | ID | |
| | | NO: 1 | NO: 1 | NO: 2 | NO: 2 | SEQ |
| Compound | | Start | Stop | Start | Start | ID |
| Number | Sequence (5′ to 3′) | Site | Site | Site | Site | NO. |
| 1335684 | TGGCACTTTCTTTTTATTTC | N/A | N/A | 8038 | 8057 | 1311 |
| 1335686 | GCACACTGACCATTTTTTAA | 2147 | 2166 | 17938 | 17957 | 584 |
| 1335687 | AAGGTTCGCCATAATGACTG | 422 | 441 | 16213 | 16232 | 38 |
| 1335688 | TGTCAGTTTTTCCCCACATA | N/A | N/A | 5716 | 5735 | 1070 |
| 1355706 | GCCACATATAGGGTCCTTTA | 1963 | 1982 | 17754 | 17773 | 66 |
| 1355707 | GTGACAATATTTACTCTTGT | 1813 | 1832 | 17604 | 17623 | 961 |
| 1355708 | GGTTACATAATGTTCATTTC | N/A | N/A | 5667 | 5686 | 1377 |
| 1355709 | TCGCCATAATGACTGCTCTG | 417 | 436 | 16208 | 16227 | 192 |
| 1373020 | CTATGTTTTCCAGTGCCCAT | 1335 | 1354 | 17126 | 17145 | 2190 |
| 1373021 | GTCATAATTTTCTTAGCTAC | N/A | N/A | 5638 | 5657 | 1914 |
| 1373022 | GCTTATTATTCATGTTCTCC | N/A | N/A | 14367 | 14386 | 1939 |
| 1373023 | GTGTCATAATTTTCTTAGCT | N/A | N/A | 5640 | 5659 | 2302 |
| 1373024 | GCTTACTCGGCTTGTTCCAC | 723 | 742 | 16514 | 16533 | 351 |
| 1373025 | ACTTGTCAGTTTTTCCCCAC | N/A | N/A | 5719 | 5738 | 1301 |
| 1373026 | ACTCTATGTTTTCCAGTGCC | 1338 | 1357 | 17129 | 17148 | 2264 |
| 1373027 | CTCTATGTTTTCCAGTGCCC | 1337 | 1356 | 17128 | 17147 | 2191 |
| 1373028 | GTCAGTTTTTCCCCACATAT | N/A | N/A | 5715 | 5734 | 2304 |
| 1393324 | ACTGAATTTTCTCTCCCAGC | N/A | N/A | 14923 | 14942 | 2646 |
| 1411004 | CGTCCATTTTCTGTGCTTTT | N/A | N/A | 5806 | 5825 | 2647 |
| 1423120 | CCATTTTCTGTGCTTTTCCT | N/A | N/A | 5803 | 5822 | 2736 |
| 1423121 | TCCATTTTCTGTGCTTTTCC | N/A | N/A | 5804 | 5823 | 2737 |
| 1423122 | GTCCATTTTCTGTGCTTTTC | N/A | N/A | 5805 | 5824 | 2738 |
| 1423123 | ACGTCCATTTTCTGTGCTTT | N/A | N/A | 5807 | 5826 | 2739 |
| 1423124 | AACGTCCATTTTCTGTGCTT | N/A | N/A | 5808 | 5827 | 2740 |
| 1423125 | AAACGTCCATTTTCTGTGCT | N/A | N/A | 5809 | 5828 | 2741 |

[0539] The modified oligonucleotides in the table below are 7-10-3 MOE gapmers with mixed PO/PS internucleoside linkages. The gapmers are 20 nucleosides in length and have a central gap segment that consists of ten 2′-β-D-deoxynucleosides, a 5′ wing segment that consists of seven 2′-MOE nucleosides, and a 3′ wing segment that consists of three 2′-MOE nucleosides. The sugar motif of the gapmers is (from 5′ to 3′): eeeeeeeddddddddddeee; wherein ‘d’ represents a 2′-β-D-deoxyribosyl sugar, and ‘e’ represents a 2′-MOE modified ribosyl sugar. The gapmers have an internucleoside linkage motif of (from 5′ to 3′): ssooooossssssssssos; wherein each “s” represents a phosphorothioate internucleoside linkage and each “o” represents a phosphodiester internucleoside linkage. Each cytosine nucleoside is a 5-methyl cytosine.

TABLE 50
7-10-3 MOE gapmers with mixed PO/PS internucleoside linkages complementary
to human PRNP

| | | SEQ | SEQ | SEQ | SEQ | |
|---|---|---|---|---|---|---|
| | | ID | ID | ID | ID | |
| | | NO: 1 | NO: 1 | NO: 2 | NO: 2 | SEQ |
| Compound | | Start | Stop | Start | Start | ID |
| Number | Sequence (5′ to 3′) | Site | Site | Site | Site | NO. |
| 1373045 | ACTCTATGTTTTCCAGTGCC | 1338 | 1357 | 17129 | 17148 | 2264 |
| 1373046 | CTATGTTTTCCAGTGCCCAT | 1335 | 1354 | 17126 | 17145 | 2190 |
| 1373047 | GTCAGTTTTTCCCCACATAT | N/A | N/A | 5715 | 5734 | 2304 |
| 1373048 | CTCTATGTTTTCCAGTGCCC | 1337 | 1356 | 17128 | 17147 | 2191 |
| 1393329 | ACTGAATTTTCTCTCCCAGC | N/A | N/A | 14923 | 14942 | 2646 |
| 1393330 | GCCACATATAGGGTCCTTTA | 1963 | 1982 | 17754 | 17773 | 66 |
| 1411006 | CGTCCATTTTCTGTGCTTTT | N/A | N/A | 5806 | 5825 | 2647 |

[0540] The modified oligonucleotides in the table below are 5-10-5 MOE gapmers with a 2′-OMe modified nucleoside at position 2 of the gap and mixed PO/PS internucleoside linkages. The gapmers are 20 nucleosides in length, wherein the 5′ wing segment consists of five 2′-MOE nucleosides and the 3′ wing segment consists of five 2′-MOE nucleosides. The gap is ten nucleosides in length, and has a nucleoside comprising a 2′-β-D-deoxyribosyl sugar moiety at positions 1, 3, 4, 5, 6, 7, 8, 9 and 10 of the gap (counting from the 5′ end) and 2′-OMe nucleoside at position 2 of the gap (counting from the 5′ end). The sugar motif of the mixed, altered gapmers is (from 5′ to 3′): eeeeedyddddddddeeeee; wherein ‘d’ represents a 2′-β-D-deoxyribosyl sugar, ‘y’ represents a 2′-O-methyl ribosyl sugar, ‘k’ represents a cEt sugar, and ‘e’ represents a 2′-MOE sugar. The gapmers have an internucleoside linkage motif of (from 5′ to 3′): sooosssssssssssooss; wherein “s” represents a phosphorothioate internucleoside linkage and “o” represents a phosphodiester internucleoside linkage. All cytosine residues are 5-methylcytosines.

TABLE 51
5-10-5 MOE gapmers having a 2′-OMe at position 2 of the gap with mixed PO/PS
internucleoside linkages complementary to human PRNP

| | | SEQ | SEQ | SEQ | SEQ | |
|---|---|---|---|---|---|---|
| | | ID | ID | ID | ID | |
| | | NO: 1 | NO: 1 | NO: 2 | NO: 2 | SEQ |
| Compound | | Start | Stop | Start | Start | ID |
| Number | SEQUENCE | Site | Site | Site | Site | NO. |
| 1418386 | CTCTATGTTTTCCAGTGCCC | 1337 | 1356 | 17128 | 17147 | 2191 |
| 1418387 | GTCAGTUTTTCCCCACATAT | N/A | N/A | 5715 | 5734 | 2648 |
| 1423126 | CGTCCAUTTTCTGTGCTTTT | N/A | N/A | 5806 | 5825 | 2744 |

[0541] The modified oligonucleotides in the table below are 5-10-5 mixed MOE/cEt gapmer with mixed PO/PS internucleoside linkages. The gapmers are 20 nucleosides in length, wherein the central gap segment consists of ten 2′-β-D-deoxynucleosides, a 5′ wing segment that consists of five 2′-MOE nucleosides, and a 3′ wing segment that consists of two cEt nucleosides and three 2′-MOE nucleosides. The sugar motif of the gapmers is (from 5′ to 3′): eeeeeddddddddddkkeee; wherein ‘d’ represents a 2′-β-D-deoxyribosyl sugar, ‘k’ represents a cEt sugar, and ‘e’ represents a 2′-MOE modified ribosyl sugar. The gapmers have an internucleoside linkage motif of (from 5′ to 3′): sooosssssssssssooss; wherein “s” represents a phosphorothioate internucleoside linkage and “o” represents a phosphodiester internucleoside linkage. All cytosine residues are 5-methylcytosines.

TABLE 52
5-10-5 MOE/cEt mixed wing gapmers with mixed PO/PS internucleoside linkages
complementary to human PRNP

| | | SEQ | SEQ | SEQ | SEQ | |
|---|---|---|---|---|---|---|
| | | ID | ID | ID | ID | |
| | | NO: 1 | NO: 1 | NO: 2 | NO: 2 | SEQ |
| Compound | | Start | Stop | Start | Start | ID |
| Number | SEQUENCE | Site | Site | Site | Site | NO. |
| 1418416 | ACTCTATGTTTTCCAGTGCC | 1338 | 1357 | 17129 | 17148 | 2264 |
| 1418417 | GCCACATATAGGGTCCTTTA | 1963 | 1982 | 17754 | 17773 | 66 |
| 1418418 | GTCATAATTTTCTTAGCTAC | N/A | N/A | 5638 | 5657 | 1914 |
| 1418419 | GTGTCATAATTTTCTTAGCT | N/A | N/A | 5640 | 5659 | 2302 |
| 1418421 | GCTTATTATTCATGTTCTCC | N/A | N/A | 14367 | 14386 | 1939 |
| 1418426 | CGTCCATTTTCTGTGCTTTT | N/A | N/A | 5806 | 5825 | 2647 |

[0542] The modified oligonucleotides in the table below are 6-10-4 mixed MOE/cEt gapmer with mixed PO/PS internucleoside linkages. The gapmers are 20 nucleosides in length, wherein the central gap segment consists of ten 2′-β-D-deoxynucleosides, a 5′ wing segment that consists of six 2′-MOE nucleosides, and a 3′ wing segment that consists of two cEt nucleosides and two 2′-MOE nucleosides. The sugar motif of the gapmers is (from 5′ to 3′): eeeeeeddddddddddkkee; wherein ‘d’ represents a 2′-β-D-deoxyribosyl sugar, ‘k’ represents a cEt sugar, and ‘e’ represents a 2′-MOE modified ribosyl sugar. The gapmers have an internucleoside linkage motif of (from 5′ to 3′): sooooossssssssssoss; wherein “s” represents a phosphorothioate internucleoside linkage and “o” represents a phosphodiester internucleoside linkage. All cytosine residues are 5-methylcytosines.

TABLE 53
6-10-4 MOE/cEt mixed wing gapmers with mixed PO/PS internucleoside linkages
complementary to human PRNP

| | | SEQ | SEQ | SEQ | SEQ | |
|---|---|---|---|---|---|---|
| | | ID | ID | ID | ID | |
| | | NO: 1 | NO: 1 | NO: 2 | NO: 2 | SEQ |
| Compound | | Start | Stop | Start | Start | ID |
| Number | SEQUENCE | Site | Site | Site | Site | NO. |
| 1418420 | GTCATAATTTTCTTAGCTAC | N/A | N/A | 5638 | 5657 | 1914 |
| 1418422 | GCCACATATAGGGTCCTTTA | 1963 | 1982 | 17754 | 17773 | 66 |
| 1418424 | GCTTATTATTCATGTTCTCC | N/A | N/A | 14367 | 14386 | 1939 |
| 1418425 | GTGTCATAATTTTCTTAGCT | N/A | N/A | 5640 | 5659 | 2302 |

[0543] The modified oligonucleotides in the table below are 6-10-4 mixed MOE gapmers with a 2′-OMe modified nucleoside at position 2 of the gap and mixed PO/PS internucleoside linkages. The gapmers are 20 nucleosides in length, wherein the 5′ wing segment consists of six 2′-MOE nucleosides, and the 3′ wing segment consists of four 2′-MOE nucleosides. The gap is ten nucleosides in length, and has a nucleoside comprising a 2′-β-D-deoxyribosyl sugar moiety at positions 1, 3, 4, 5, 6, 7, 8, 9 and 10 of the gap (counting from the 5′ end) and a 2′-OMe nucleoside at position 2 of the gap (counting from the 5′ end). The sugar motif of the mixed, altered gapmers is (from 5′ to 3′): eeeeeedyddddddddeeee; wherein ‘d’ represents a 2′-β-D-deoxyribosyl sugar, ‘y’ represents a 2′-O-methyl ribosyl sugar, ‘k’ represents a cEt sugar, and ‘e’ represents a 2′-MOE sugar. The gapmers have an internucleoside linkage motif of (from 5′ to 3′): sooooossssssssssoss; wherein “s” represents a phosphorothioate internucleoside linkage and “o” represents a phosphodiester internucleoside linkage. All cytosine residues are 5-methylcytosines.

TABLE 54
6-10-4 MOE gapmers having a 2′-OMe at position 2 of the gap with mixed PO/PS
internucleoside linkages complementary to human PRNP

| | | SEQ | SEQ | SEQ | SEQ | |
|---|---|---|---|---|---|---|
| | | ID | ID | ID | ID | |
| | | NO: 1 | NO: 1 | NO: 2 | NO: 2 | SEQ |
| Compound | | Start | Stop | Start | Start | ID |
| Number | SEQUENCE | Site | Site | Site | Site | NO. |
| 1418389 | TGGCACTUTCTTTTTATTTC | N/A | N/A | 8038 | 8057 | 2743 |
| 1423127 | GGTTACAUAATGTTCATTTC | N/A | N/A | 5667 | 5686 | 2742 |

[0544] The modified oligonucleotides in the table below are 5-9-5 MOE gapmers with mixed PO/PS internucleoside linkages. The gapmers are 19 nucleosides in length and have a central gap segment that consists of nine 2′-β-D-deoxynucleosides, a 5′ wing segment that consists of five 2′-MOE nucleosides, and a 3′ wing segment that consists of five 2′-MOE nucleosides. The sugar motif of the gapmers is (from 5′ to 3′): eeeeedddddddddeeeee; wherein ‘d’ represents a 2′-β-D-deoxyribosyl sugar, and ‘e’ represents a 2′-MOE modified ribosyl sugar. The gapmers have an internucleoside linkage motif of (from 5′ to 3′): soooossssssssssoos; wherein each “s” represents a phosphorothioate internucleoside linkage and each “o” represents a phosphodiester internucleoside linkage. Each cytosine nucleoside is a 5-methyl cytosine.

TABLE 55
5-9-5 MOE gapmers with mixed PO/PS internucleoside linkages complementary
to human PRNP

| | | SEQ | SEQ | SEQ | SEQ | |
|---|---|---|---|---|---|---|
| | | ID | ID | ID | ID | |
| | | NO: 1 | NO: 1 | NO: 2 | NO: 2 | SEQ |
| Compound | | Start | Stop | Start | Start | ID |
| Number | Sequence (5′ to 3′) | Site | Site | Site | Site | NO. |
| 1373049 | GTCAGTTTTTCCCCACATA | N/A | N/A | 5716 | 5734 | 2745 |
| 1373050 | GTGTCATAATTTTCTTAGC | N/A | N/A | 5641 | 5659 | 2764 |
| 1373051 | GCTTATTATTCATGTTCTC | N/A | N/A | 14368 | 14386 | 2765 |
| 1373052 | GCTTACTCGGCTTGTTCCA | 724 | 742 | 16515 | 16533 | 2766 |
| 1373053 | CTCTATGTTTTCCAGTGCC | 1338 | 1356 | 17129 | 17147 | 2746 |
| 1373054 | GCACACTGACCATTTTTTA | 2148 | 2166 | 17939 | 17957 | 2747 |
| 1373055 | ACTCTATGTTTTCCAGTGC | 1339 | 1357 | 17130 | 17148 | 2748 |
| 1373056 | TGTCAGTTTTTCCCCACAT | N/A | N/A | 5717 | 5735 | 2749 |
| 1373057 | GTCATAATTTTCTTAGCTA | N/A | N/A | 5639 | 5657 | 2750 |
| 1373058 | CTATGTTTTCCAGTGCCCA | 1336 | 1354 | 17127 | 17145 | 2751 |
| 1373059 | TCTATGTTTTCCAGTGCCC | 1337 | 1355 | 17128 | 17146 | 2752 |
| 1393333 | CTGAATTTTCTCTCCCAGC | N/A | N/A | 14923 | 14941 | 2753 |
| 1393334 | CCACATATAGGGTCCTTTA | 1963 | 1981 | 17754 | 17772 | 2754 |
| 1393335 | GCCACATATAGGGTCCTTT | 1964 | 1982 | 17755 | 17773 | 2755 |
| 1393336 | ACTGAATTTTCTCTCCCAG | N/A | N/A | 14924 | 14942 | 2756 |

[0545] The modified oligonucleotides in the table below are 5-9-5 MOE gapmers with mixed PO/PS internucleoside linkages. The gapmers are 19 nucleosides in length and have a central gap segment that consists of nine 2′-β-D-deoxynucleosides, a 5′ wing segment that consists of five 2′-MOE nucleosides, and a 3′ wing segment that consists of five 2′-MOE nucleosides. The sugar motif of the gapmers is (from 5′ to 3′): eeeeedddddddddeeeee; wherein ‘d’ represents a 2′-β-D-deoxyribosyl sugar, and ‘e’ represents a 2′-MOE modified ribosyl sugar. The gapmers have an internucleoside linkage motif of (from 5′ to 3′): soooosssssssssooss; wherein each “s” represents a phosphorothioate internucleoside linkage and each “o” represents a phosphodiester internucleoside linkage. Each cytosine nucleoside is a 5-methyl cytosine.

TABLE 56
5-9-5 MOE gapmers with mixed PO/PS internucleoside linkages complementary
to human PRNP

| | | SEQ | SEQ | SEQ | SEQ | |
|---|---|---|---|---|---|---|
| | | ID | ID | ID | ID | |
| | | NO: 1 | NO: 1 | NO: 2 | NO: 2 | SEQ |
| Compound | | Start | Stop | Start | Start | ID |
| Number | Sequence (5′ to 3′) | Site | Site | Site | Site | NO. |
| 1373060 | CTATGTTTTCCAGTGCCCA | 1336 | 1354 | 17127 | 17145 | 2751 |
| 1373061 | CTTATTATTCATGTTCTCC | N/A | N/A | 14367 | 14385 | 2757 |
| 1373062 | CTTACTCGGCTTGTTCCAC | 723 | 741 | 16514 | 16532 | 2758 |
| 1373063 | TGTCATAATTTTCTTAGCT | N/A | N/A | 5640 | 5658 | 2759 |
| 1373064 | TCTATGTTTTCCAGTGCCC | 1337 | 1355 | 17128 | 17146 | 2752 |
| 1373065 | TCATAATTTTCTTAGCTAC | N/A | N/A | 5638 | 5656 | 2760 |
| 1373066 | CACACTGACCATTTTTTAA | 2147 | 2165 | 17938 | 17956 | 2761 |
| 1373067 | CTCTATGTTTTCCAGTGCC | 1338 | 1356 | 17129 | 17147 | 2746 |
| 1373068 | GTCAGTTTTTCCCCACATA | N/A | N/A | 5716 | 5734 | 2745 |
| 1373069 | TCAGTTTTTCCCCACATAT | N/A | N/A | 5715 | 5733 | 2762 |
| 1373070 | TATGTTTTCCAGTGCCCAT | 1335 | 1353 | 17126 | 17144 | 2763 |

[0546] The modified oligonucleotide in the table below is a 5-9-5 mixed MOE/cEt gapmer with mixed PO/PS internucleoside linkages. The gapmer is 19 nucleosides in length, wherein the central gap segment consists of nine 2′-β-D-deoxynucleosides, a 5′ wing segment that consists of five 2′-MOE nucleosides, and a 3′ wing segment that consists of two cEt nucleosides and three 2′-MOE nucleosides. The sugar motif of the gapmers is (from 5′ to 3′): eeeeedddddddddkkeee; wherein ‘d’ represents a 2′-β-D-deoxyribosyl sugar, ‘k’ represents a cEt sugar, and ‘e’ represents a 2′-MOE modified ribosyl sugar. The gapmers have an internucleoside linkage motif of (from 5′ to 3′):soooossssssssssoos; wherein “s” represents a phosphorothioate internucleoside linkage and “o” represents a phosphodiester internucleoside linkage. All cytosine residues are 5-methylcytosines.

TABLE 57
5-9-5 MOE/cEt mixed wing gapmers with mixed PO/PS internucleoside linkages
complementary to human PRNP

| | | SEQ | SEQ | SEQ | SEQ | |
|---|---|---|---|---|---|---|
| | | ID | ID | ID | ID | |
| | | No: 1 | No: 1 | No: 2 | No: 2 | SEQ |
| Compound | | Start | Stop | Start | Start | ID |
| Number | SEQUENCE | Site | Site | Site | Site | No. |
| 1418423 | GTCATAATTTTCTTAGCTA | N/A | N/A | 5639 | 5657 | 2750 |

[0547] The modified oligonucleotides in the table below are 5-8-5 MOE gapmers with mixed PO/PS internucleoside linkages. The gapmers are 18 nucleosides in length and have a central gap segment that consists of eight 2′-β-D-deoxynucleosides, a 5′ wing segment that consists of five 2′-MOE nucleosides, and a 3′ wing segment that consists of five 2′-MOE nucleosides. The sugar motif of the gapmers is (from 5′ to 3′): eeeeeddddddddeeeee; wherein ‘d’ represents a 2′-β-D-deoxyribosyl sugar, and ‘e’ represents a 2′-MOE modified ribosyl sugar. The gapmers have an internucleoside linkage motif of (from 5′ to 3′): sooosssssssssooss; wherein each “s” represents a phosphorothioate internucleoside linkage and each “o” represents a phosphodiester internucleoside linkage. Each cytosine nucleoside is a 5-methyl cytosine.

TABLE 58
5-8-5 MOE gapmers with mixed PO/PS internucleoside linkages complementary
to human PRNP

| | | SEQ | SEQ | SEQ | SEQ | |
|---|---|---|---|---|---|---|
| | | ID | ID | ID | ID | |
| | | NO: 1 | NO: 1 | NO: 2 | NO: 2 | SEQ |
| Compound | | Start | Stop | Start | Start | ID |
| Number | Sequence (5′ to 3′) | Site | Site | Site | Site | NO. |
| 1373071 | CAGTTTTTCCCCACATAT | N/A | N/A | 5715 | 5732 | 2767 |
| 1373072 | ACTCTATGTTTTCCAGTG | 1340 | 1357 | 17131 | 17148 | 2777 |
| 1373073 | TCTATGTTTTCCAGTGCC | 1338 | 1355 | 17129 | 17146 | 2778 |
| 1373074 | CTCTATGTTTTCCAGTGC | 1339 | 1356 | 17130 | 17147 | 2779 |
| 1373075 | CTATGTTTTCCAGTGCCC | 1337 | 1354 | 17128 | 17145 | 2768 |
| 1373076 | GTCAGTTTTTCCCCACAT | N/A | N/A | 5717 | 5734 | 2769 |
| 1373077 | TCAGTTTTTCCCCACATA | N/A | N/A | 5716 | 5733 | 2770 |
| 1393337 | CCACATATAGGGTCCTTT | 1964 | 1981 | 17755 | 17772 | 2771 |
| 1393338 | CACATATAGGGTCCTTTA | 1963 | 1980 | 17754 | 17771 | 2772 |
| 1393339 | ACTGAATTTTCTCTCCCA | N/A | N/A | 14925 | 14942 | 2773 |
| 1393340 | TGAATTTTCTCTCCCAGC | N/A | N/A | 14923 | 14940 | 2774 |
| 1393341 | CTGAATTTTCTCTCCCAG | N/A | N/A | 14924 | 14941 | 2775 |
| 1393342 | GCCACATATAGGGTCCTT | 1965 | 1982 | 17756 | 17773 | 2776 |

[0548] The modified oligonucleotide in the table below is a 5-8-5 MOE gapmer with a 2′-OMe modified nucleoside at position 2 of the gap and mixed PO/PS internucleoside linkages. The gapmers are 18 nucleosides in length, wherein the 5′ wing segment consists of five 2′-MOE nucleosides and the 3′ wing segment consists of five 2′-MOE nucleosides.

[0549] The gap is eight nucleosides in length, and has a nucleoside comprising a 2′-β-D-deoxyribosyl sugar moiety at positions 1, 3, 4, 5, 6, 7, and 8 of the gap (counting from the 5′ end) and 2′-OMe nucleoside at position 2 of the gap (counting from the 5′ end). The sugar motif of the gapmer is (from 5′ to 3′): eeeeedyddddddeeeee; wherein ‘d’ represents a 2′-β-D-deoxyribosyl sugar, ‘y’ represents a 2′-O-methyl ribosyl sugar, and ‘e’ represents a 2′-MOE sugar. The gapmers have an internucleoside linkage motif of (from 5′ to 3′): sooosssssssssooss; wherein “s” represents a phosphorothioate internucleoside linkage and “o” represents a phosphodiester internucleoside linkage. All cytosine residues are 5-methylcytosines.

TABLE 59
5-8-5 MOE gapmers having a 2′-OMe at position 2 of the gap with mixed
PO/PS internucleoside linkages complementary to human PRNP

| | | SEQ | SEQ | SEQ | SEQ | |
|---|---|---|---|---|---|---|
| | | ID | ID | ID | ID | |
| | | No: 1 | No: 1 | No: 2 | No: 2 | SEQ |
| Compound | | Start | Stop | Start | Start | ID |
| Number | SEQUENCE | Site | Site | Site | Site | No. |
| 1418388 | CTATGTUTTCCAGTGCCC | 1337 | 1354 | 17128 | 17145 | 2780 |

[0550] The modified oligonucleotides in the table below are 4-8-5 mixed MOE/cEt gapmers with mixed PO/PS internucleoside linkages. The gapmers are 17 nucleosides in length, wherein the central gap segment consists of eight 2′-β-D-deoxynucleosides, a 5′ wing segment that consists of four 2′-MOE nucleosides, and a 3′ wing segment that consists of two cEt nucleosides and three 2′-MOE nucleosides. The sugar motif of the gapmers is (from 5′ to 3′): eeeeddddddddkkeee; wherein ‘d’ represents a 2′-β-D-deoxyribosyl sugar, ‘k’ represents a cEt sugar, and ‘e’ represents a 2′-MOE modified ribosyl sugar. The gapmers have an internucleoside linkage motif of (from 5′ to 3′): soosssssssssooss; wherein “s” represents a phosphorothioate internucleoside linkage and “o” represents a phosphodiester internucleoside linkage. All cytosine residues are 5-methylcytosines.

TABLE 60
4-8-5 MOE/cEt mixed wing gapmers with mixed PO/PS internucleoside linkages
complementary to human PRNP

| | | SEQ | SEQ | SEQ | SEQ | |
|---|---|---|---|---|---|---|
| | | ID | ID | ID | ID | |
| | | No: 1 | No: 1 | No: 2 | No: 2 | SEQ |
| Compound | | Start | Stop | Start | Start | ID |
| Number | SEQUENCE | Site | Site | Site | Site | No. |
| 1418390 | CTATGTTTTCCAGTGCC | 1338 | 1354 | 17129 | 17145 | 2802 |
| 1418391 | ACTCTATGTTTTCCAGT | 1341 | 1357 | 17132 | 17148 | 2781 |
| 1418392 | TCTATGTTTTCCAGTGC | 1339 | 1355 | 17130 | 17146 | 2782 |
| 1418393 | CTCTATGTTTTCCAGTG | 1340 | 1356 | 17131 | 17147 | 2783 |
| 1418394 | ACATATAGGGTCCTTTA | 1963 | 1979 | 17754 | 17770 | 2784 |
| 1418395 | GCCACATATAGGGTCCT | 1966 | 1982 | 17757 | 17773 | 2785 |
| 1418396 | CACATATAGGGTCCTTT | 1964 | 1980 | 17755 | 17771 | 2786 |
| 1418397 | CCACATATAGGGTCCTT | 1965 | 1981 | 17756 | 17772 | 2787 |
| 1418398 | ATAATTTTCTTAGCTAC | N/A | N/A | 5638 | 5654 | 2788 |
| 1418399 | GTCATAATTTTCTTAGC | N/A | N/A | 5641 | 5657 | 2789 |
| 1418400 | CATAATTTTCTTAGCTA | N/A | N/A | 5639 | 5655 | 2790 |
| 1418401 | TCATAATTTTCTTAGCT | N/A | N/A | 5640 | 5656 | 2791 |
| 1418402 | GTGTCATAATTTTCTTA | N/A | N/A | 5643 | 5659 | 2792 |
| 1418403 | TGTCATAATTTTCTTAG | N/A | N/A | 5642 | 5658 | 2793 |
| 1418404 | TATTATTCATGTTCTCC | N/A | N/A | 14367 | 14383 | 2794 |
| 1418405 | GCTTATTATTCATGTTC | N/A | N/A | 14370 | 14386 | 2795 |
| 1418406 | TTATTATTCATGTTCTC | N/A | N/A | 14368 | 14384 | 2796 |
| 1418407 | CTTATTATTCATGTTCT | N/A | N/A | 14369 | 14385 | 2797 |
| 1418412 | CCATTTTCTGTGCTTTT | N/A | N/A | 5806 | 5822 | 2798 |
| 1418413 | CGTCCATTTTCTGTGCT | N/A | N/A | 5809 | 5825 | 2799 |
| 1418414 | TCCATTTTCTGTGCTTT | N/A | N/A | 5807 | 5823 | 2800 |
| 1418415 | GTCCATTTTCTGTGCTT | N/A | N/A | 5808 | 5824 | 2801 |

[0551] The modified oligonucleotides in the table below are 4-8-4 mixed MOE/cEt gapmers with mixed PO/PS internucleoside linkages. The gapmers are 17 nucleosides in length, wherein the central gap segment consists of eight 2′-β-D-deoxynucleosides, a 5′ wing segment that consists of four 2′-MOE nucleosides, and a 3′ wing segment that consists of two cEt nucleosides and two 2′-MOE nucleosides. The sugar motif of the gapmers is (from 5′ to 3′): eeeeddddddddkkee; wherein ‘d’ represents a 2′-β-D-deoxyribosyl sugar, ‘k’ represents a cEt sugar, and ‘e’ represents a 2′-MOE modified ribosyl sugar. The gapmers have an internucleoside linkage motif of (from 5′ to 3′): soosssssssssoos; wherein “s” represents a phosphorothioate internucleoside linkage and “o” represents a phosphodiester internucleoside linkage. All cytosine residues are 5-methylcytosines.

TABLE 61
4-8-4 MOE/cEt mixed wing gapmers with mixed PO/PS internucleoside linkages
complementary to human PRNP

| | | SEQ | SEQ | SEQ | SEQ | |
|---|---|---|---|---|---|---|
| | | ID | ID | ID | ID | |
| | | No: 1 | No: 1 | No: 2 | No: 2 | SEQ |
| Compound | | Start | Stop | Start | Start | ID |
| Number | SEQUENCE | Site | Site | Site | Site | No. |
| 1418408 | ATAATTTTCTTAGCTA | N/A | N/A | 5639 | 5654 | 2806 |
| 1418409 | GTCATAATTTTCTTAG | N/A | N/A | 5642 | 5657 | 2803 |
| 1418410 | CATAATTTTCTTAGCT | N/A | N/A | 5640 | 5655 | 2804 |
| 1418411 | TCATAATTTTCTTAGC | N/A | N/A | 5641 | 5656 | 2805 |

### Example 5: Activity of Modified Oligonucleotides Complementary to Human PRNP in Transgenic Mice

[0552] Modified oligonucleotides described above were tested in human PRNP knock-in mouse model. Humanization of PRNP gene was done via CRISPR/Cas-9-mediated gene editing, allowing for generation of a model with constitutive expression of human PRNP gene. Targeting strategy was based on NCBI transcripts NM_011170.3 (mouse) and NM_000311.1 (human). Mouse genomic sequence from exon 1 (5′ untranslated region, UTR) to exon 3 (3′ UTR) were replaced with its human counterpart. A plasmid allowing expression of Cas9 mRNA and specific gRNA, plasmid containing the puromycin resistance cassette, and a plasmid containing the homology regions of the mouse PRNP gene and the replaced human region were co-transfected into the Taconic Biosciences C57BL/6N Tac ES cell line. Homologous recombination clones were isolated using positive puromycin selection, and humanized allele was obtained after Cas9-mediated gene editing. Line C57BL/6NTac-Pmp<em5804_E-DO5(PRNP) was used in these experiments. Human PRNP RNA expression is found in the brain and spinal cord.

### Treatment

[0553] The PRNP knock-in mice were divided into groups of 2-3 mice each. Each mouse received a single ICV bolus of 300 μg of a modified oligonucleotide described above. A group of 2-4 mice received PBS as a negative control within each study. Also tested in one study were comparator compounds 169746, 169750, 169753, and 169764, described herein above and in WO2010/019270.

### RNA Analysis

[0554] Two weeks post treatment, mice were sacrificed and RNA was extracted from cortical brain tissue and spinal cord for RTPCR analysis to measure amount of PRNP RNA using human primer probe sets RTS42354 (described herein above) and primer probe set RTS42356 (forward sequence GGTGGTGTCTCACTCTTTCTTC, designated herein as SEQ ID NO: 12; reverse sequence CCAGCATCTCAGGTCTACTCTA, designated herein as SEQ ID NO: 13; probe sequence AATACCCTTGGCACTGATGGGCA, designated herein as SEQ ID NO: 14). Results are presented as percent human PRNP RNA relative to PBS control, normalized to mouse cyclophilin A. Each study is represented in a separate table. Cyclophilin A was amplified using primer probe set m_cyclo24 (forward sequence TCGCCGCTTGCTGCA, designated herein as SEQ ID NO: 18; reverse sequence ATCGGCCGTGATGTCGA, designated herein as SEQ ID NO: 19; probe sequence CCATGGTCAACCCCACCGTGTTC, designated herein as SEQ ID NO: 20). In some cases, RTPCR value is not defined for a certain sample, and is labeled N.D. (Not Defined). The values marked with a (*) symbol indicate that the modified oligonucleotide is complementary to the amplicon region of the primer probe set. Additional assays may be used to measure the potency and efficacy of the modified oligonucleotides complementary to the amplicon region, including testing with a second primer probe set.

[0555] As shown in the table below, treatment with modified oligonucleotides resulted in reduction of PRNP RNA in comparison to the PBS control.

TABLE 62
Reduction of human PRNP RNA in knock-in mice

| | PRNP RNA (% control) | | | |
|---|---|---|---|---|
| Compound | RTS42354 | | RTS42356 | |
| Number | Cortex | Spinal Cord | Cortex | Spinal Cord |
| PBS | 100 | 100 | 100 | 100 |
| 169746 | 67 | 52 | 72 | 46 |
| 169750 | 73‡ | 61‡ | 78‡ | 52‡ |
| 169753 | 37 | 32 | 37 | 29 |
| 169764 | 77 | 61 | 80 | 57 |
| 1201071 | 80 | 67 | 83 | 54 |
| 1201142 | 29‡ | 30‡ | 35‡ | 28‡ |
| 1238171 | 62* | 71* | 83 | 74 |
| 1238195 | 90 | 67 | 87 | 64 |
| 1238240 | 63 | 46 | 8* | 6* |
| 1238320 | 83 | 71 | 93 | 60 |
| 1238321 | 73 | 73 | 82 | 69 |
| 1239027 | 28 | 25 | 29 | 20 |
| 1239250 | 32 | 20 | 32 | 16 |
| 1239696 | 88 | 73 | 90 | 65 |
| 1270230 | 48 | 44 | 33* | 21* |
| 1270231 | 15 | 22 | 13* | 10* |
| 1270232 | 29 | 29 | 28* | 20* |
| 1270293 | 64 | 64 | 63 | 54 |
| 1270406 | 16 | 19 | 18 | 12 |
| 1270457 | 42 | 26 | 46 | 22 |
| 1270458 | 44 | 36 | 47 | 30 |
| 1335684 | 30 | 28 | 30 | 20 |
| 1335686 | 47 | 37 | 46 | 27 |
| 1335688 | 34 | 22 | 35 | 16 |

‡Notes value is based on a single animal and is not an average.

TABLE 63
Reduction of human PRNP RNA in knock-in mice

| | PRNP RNA (% control) | | | |
|---|---|---|---|---|
| Compound | RTS42354 | | RTS42356 | |
| Number | Cortex | Spinal Cord | Cortex | Spinal Cord |
| PBS | 100 | 100 | 100 | 100 |
| 1200973 | 12* | 10* | 94 | 73 |
| 1201005 | 52 | 30 | 53 | 33 |
| 1201142 | 61 | 16 | 43 | 18 |
| 1238167 | 44* | 6* | 104 | 74 |
| 1238168 | 52* | 8* | 103 | 74 |
| 1238169 | 42* | 6* | 88 | 52 |
| 1238170 | 39* | 6* | 76 | 51 |
| 1238322 | 61 | 21 | 63 | 30 |
| 1238325 | 84 | 30 | 70 | 35 |
| 1238490 | 60 | 26 | 43 | 28 |
| 1238498 | 97 | 48 | 68 | 54 |
| 1238507 | 104 | 48 | 74 | 50 |
| 1238517 | 104 | 45 | 67 | 44 |
| 1238812 | 72 | 40 | 48 | 35 |
| 1238863 | 119 | 46 | 76 | 41 |
| 1238987 | 88 | 35 | 57 | 34 |
| 1239009 | 68 | 34 | 44 | 31 |
| 1239027 | 49 | 24 | 33 | 23 |
| 1239052 | 94 | 40 | 60 | 38 |
| 1239234 | 70 | 29 | 44 | 28 |
| 1239250 | 54 | 19 | 36 | 18 |
| 1239544 | 80 | 29 | 55 | 27 |
| 1201143 | 123 | 40 | 83 | 37 |
| 1201154 | 100 | 36 | 66 | 34 |
| 1201157 | 111 | 49 | 74 | 42 |
| 1201255 | 142 | 66 | 93 | 59 |
| 1238580 | 80 | 48 | 53 | 47 |
| 1238582 | 130 | 67 | 83 | 65 |
| 1238600 | 123 | 57 | 80 | 56 |
| 1238632 | 115 | 60 | 74 | 57 |

TABLE 64
Reduction of human PRNP RNA in knock-in mice

| | PRNP RNA (% control) | | | |
|---|---|---|---|---|
| Compound | RTS42354 | | RTS42356 | |
| Number | Cortex | Spinal Cord | Cortex | Spinal Cord |
| PBS | 100 | 100 | 100 | 100 |
| 1201142 | 44 | 29 | 44 | 32 |
| 1200974 | 37* | 46* | 96 | 96 |
| 1200975 | 43* | 21* | 101 | 85 |
| 1200976 | 67* | 47* | 102 | 86 |
| 1200978 | 33* | 26* | 105 | 104 |
| 1201143 | 77 | 38 | 73 | 41 |
| 1238339 | 81 | 50 | 78 | 53 |
| 1238404 | 86 | 49 | 80 | 57 |
| 1238410 | 56 | 38 | 55 | 43 |
| 1238489 | 93 | 70 | 89 | 73 |
| 1238491 | 65 | 49 | 58 | 47 |
| 1238492 | 66 | 53 | 61 | 53 |
| 1238500 | 69 | 44 | 61 | 45 |
| 1238501 | 59 | 49 | 53 | 50 |
| 1238600 | 83 | 67 | 78 | 70 |
| 1238814 | 83 | 51 | 76 | 53 |
| 1238837 | 64 | 48 | 60 | 50 |
| 1238947 | 80 | 41 | 80 | 49 |
| 1238990 | 86 | 48 | 84 | 54 |
| 1238996 | 64 | 42 | 60 | 46 |
| 1239010 | 76 | 37 | 71 | 39 |
| 1239024 | 93 | 72 | 91 | 77 |
| 1239025 | 89 | 52 | 79 | 54 |
| 1239026 | 91 | 67 | 84 | 64 |
| 1239028 | 59 | 38 | 58 | 40 |
| 1239029 | 65 | 40 | 64 | 42 |
| 1239030 | 47 | 34 | 43 | 37 |
| 1239031 | 68 | 44 | 66 | 49 |
| 1239045 | 80 | 51 | 79 | 55 |
| 1239062 | 97 | 68 | 97 | 79 |
| 1239063 | 88 | 39 | 87 | 43 |
| 1239293 | 91 | 40 | 90 | 42 |
| 1239448 | 13 | 180 | 8 | 111 |
| 1270213 | 43* | 66* | 92 | 98 |
| 1270228 | 65 | 39 | 43* | 32* |
| 1270229 | 39 | 27 | 32* | 22* |
| 1270230 | 32 | 39 | 18* | 26* |
| 1270231 | 42 | 21 | 27* | 16* |
| 1270232 | 50 | 22 | 35* | 18* |
| 1270233 | 70 | 46 | 56* | 47* |
| 1270301 | 78 | 58 | 70 | 60 |
| 1270302 | 81 | 61 | 73 | 60 |
| 1270303 | 97 | 58 | 90 | 60 |
| 1270405 | 72 | 49 | 64 | 53 |
| 1270406 | 25 | 19 | 22 | 20 |
| 1270457 | 37 | 27 | 35 | 30 |
| 1270458 | 40 | 33 | 36 | 34 |
| 1335684 | 32 | 31 | 25 | 30 |
| 1335686 | 39 | 36 | 32 | 34 |
| 1335687 | 44* | 58* | 83 | 79 |
| 1335688 | 34 | 19 | 31 | 18 |

TABLE 65
Reduction of human PRNP RNA in knock-in mice

| | PRNP RNA (% control) | | | |
|---|---|---|---|---|
| Compound | RTS42354 | | RTS42356 | |
| Number | Cortex | Spinal Cord | Cortex | Spinal Cord |
| PBS | 100 | 100 | 100 | 100 |
| 1201142 | 31 | 33 | 29 | 31 |
| 1201144 | 114 | 80 | 102 | 66 |
| 1238319 | 91 | 79 | 97 | 80 |
| 1238326 | 88 | 70 | 84 | 56 |
| 1238328 | ‡93 | ‡86 | ‡85 | ‡63 |
| 1238335 | 80 | 61 | 69 | 57 |
| 1238397 | 110 | 100 | 97 | 90 |
| 1238398 | 104 | 79 | 96 | 72 |
| 1238994 | 41 | 32 | 39 | 29 |
| 1238998 | 87 | 86 | 80 | 77 |
| 1239003 | 98 | 85 | 94 | 76 |
| 1239004 | 62 | 47 | 95 | 91 |
| 1239005 | 57 | 72 | 88 | 81 |
| 1239007 | 92 | 75 | 86 | 66 |
| 1239008 | 62 | 67 | 61 | 59 |
| 1239012 | 100 | 82 | 92 | 69 |
| 1239013 | 96 | 97 | 91 | 86 |
| 1239015 | 73 | 69 | 62 | 61 |
| 1270212 | 26* | 47* | 96 | 88 |
| 1270265 | 63 | 57 | 60 | 50 |
| 1270279 | 108 | 92 | 93 | 85 |
| 1270280 | 77 | 80 | 71 | 71 |
| 1270281 | 56 | 38 | 55 | 41 |
| 1270282 | 83 | 52 | 75 | 46 |
| 1270400 | 41 | 33 | 38 | 27 |
| 1270401 | 106 | 100 | 89 | 79 |
| 1270402 | 107 | 82 | 93 | 67 |
| 1270542 | 100 | 100 | 83 | 82 |
| 1270551 | 115 | 105 | 105 | 88 |
| 1270584 | 100 | 91 | 85 | 76 |
| 1270616 | 120 | 108 | 105 | 88 |
| 1355700 | 111* | 112* | 108 | 98 |
| 1355701 | 36* | 54* | 103 | 96 |
| 1355702 | 113* | 103* | 105 | 93 |
| 1355703 | 43* | 64* | 89 | 87 |
| 1355704 | 70* | 81* | 98 | 96 |
| 1355705 | 67* | 83* | 96 | 99 |
| 1355706 | 32 | 30 | 29 | 25 |
| 1355707 | 70 | 55 | 60 | 48 |
| 1355708 | 40 | 40 | 37 | 35 |
| 1355709 | 16* | 17* | 78 | 70 |

‡Notes value is based on a single animal and is not an average.

TABLE 66
Reduction of human PRNP RNA in knock-in mice

| | PRNP RNA (% control) | | | |
|---|---|---|---|---|
| Compound | RTS42354 | | RTS42356 | |
| Number | Cortex | Spinal Cord | Cortex | Spinal Cord |
| PBS | 100 | 100 | 100 | 100 |
| 1201142 | 37 | 69 | 40 | 98 |
| 1201004 | 90 | 61 | 90 | 116 |
| 1201006 | 68 | 58 | 70 | 123 |
| 1201007 | 76 | 60 | 76 | 91 |
| 1201141 | 62 | 55 | 64 | 92 |
| 1238202 | 91 | 82 | 92 | 109 |
| 1239543 | 68 | 74 | 69 | 92 |
| 1239545 | 81 | 81 | 79 | 88 |
| 1239546 | 90 | 87 | 88 | 71 |
| 1239547 | 91 | 113 | 93 | 86 |
| 1373020 | 60 | 65 | 18* | 25* |
| 1373021 | 31 | 32 | 26 | 35 |
| 1373022 | 36 | 43 | 37 | 40 |
| 1373023 | 28 | 28 | 28 | 35 |
| 1373024 | 62 | 59 | 60 | 50 |
| 1373025 | 57 | 45 | 59 | 43 |
| 1373026 | 57 | 48 | 44* | 28* |
| 1373027 | 53 | 56 | 31* | 21* |
| 1373028 | 72 | 61 | 68 | 56 |
| 1373029 | 73 | 68 | 61* | 35* |
| 1373030 | 73 | 60 | 66* | 40* |
| 1373031 | 68 | 63 | 56 | 44 |
| 1373032 | 59 | 43 | 57 | 50 |
| 1373033 | 83 | 55 | 82 | 70 |
| 1373034 | 56 | 48 | 57 | 79 |
| 1373035 | 64 | 48 | 64 | 81 |
| 1373036 | 41 | 33 | 40* | 45* |
| 1373037 | 35 | 37 | 32* | 53* |
| 1373038 | 41 | 31 | 41 | 51 |
| 1373039 | 51 | 51 | 50 | 70 |
| 1373040 | 34 | 34 | 35 | 56 |
| 1373041 | 32 | 44 | 29 | 51 |
| 1373042 | 57 | 59 | 56* | 41* |
| 1373043 | 39 | 48 | 37* | 32* |
| 1373044 | 36 | 42 | 26* | 28* |
| 1373045 | 49 | 59 | 31* | 29* |
| 1373046 | 52 | 57 | 15* | 16* |
| 1373047 | 56 | 58 | 44 | 42 |
| 1373048 | 46 | 67 | 21* | 22* |
| 1373049 | 59 | 48 | 51 | 40 |
| 1373050 | 65 | 66 | 44 | 44 |
| 1373051 | 59 | 72 | 57 | 61 |
| 1373052 | 59 | 68 | 48 | 56 |
| 1373053 | 44 | 50 | 35* | 38* |
| 1373054 | 53 | 64 | 46 | 59 |
| 1373055 | 75 | 78 | 668 | 518 |
| 1373056 | 39 | 33 | 43 | 32 |
| 1373057 | 41 | 25 | 29 | 24 |
| 1373058 | 45 | 42 | 24* | 19* |
| 1373059 | 31 | 22 | 20* | 15* |
| 1373060 | 42 | 43 | 24* | 19* |
| 1373061 | 46 | 64 | 45 | 59 |
| 1373062 | 62 | 89 | 90 | 85 |
| 1373063 | 43 | 52 | 74 | 43 |
| 1373064 | 71 | 92 | 89* | 81* |
| 1373065 | 93 | 93 | 94 | 83 |
| 1373066 | 95 | 94 | 77 | 82 |
| 1373067 | 64 | 34 | 46* | 20* |
| 1373068 | 53 | 36 | 55 | 31 |
| 1373069 | 57 | 51 | 66 | 49 |
| 1373070 | 66 | 55 | 62* | 56* |
| 1373071 | 70 | 70 | 73 | 67 |
| 1373072 | 62 | 58 | 55* | 52* |
| 1373073 | 51 | 46 | 45* | 40* |
| 1373074 | 63 | 47 | 56* | 41* |
| 1373075 | 31 | 27 | 25* | 14* |
| 1373076 | 30 | 23 | 29 | 16 |
| 1373077 | 80 | 71 | 76 | 66 |
| 1373078 | 54 | 36 | 53 | 35 |

TABLE 67
Reduction of human PRNP RNA in knock-in mice

| | PRNP RNA (% control) | | | |
|---|---|---|---|---|
| Compound | RTS42354 | | RTS42356 | |
| Number | Cortex | Spinal Cord | Cortex | Spinal Cord |
| PBS | 100 | 100 | 100 | 100 |
| 1201263 | 62 | 45 | 64 | 44 |
| 1201324 | 86 | 63 | 92 | 66 |
| 1238739 | 74 | 45 | 74 | 47 |
| 1238741 | 91 | 56 | 93 | 60 |
| 1238816 | 72 | 48 | 74 | 52 |
| 1238818 | 97 | 63 | 97 | 71 |
| 1238867 | 87 | 68 | 91 | 69 |
| 1238940 | 87 | 48 | 88 | 50 |
| 1239047 | 91 | 63 | 96 | 66 |
| 1239048 | 84 | 67 | 91 | 70 |
| 1239073 | 66 | 41 | 67 | 43 |
| 1239079 | 71 | 50 | 73 | 52 |
| 1239086 | 82 | 60 | 85 | 64 |
| 1239138 | 77 | 39 | 76 | 41 |
| 1239159 | 101 | 64 | 100 | 62 |
| 1239185 | 92 | 58 | 99 | 60 |
| 1239235 | 56 | 32 | 60 | 35 |
| 1239272 | 79 | 45 | 86 | 49 |
| 1239346 | 61 | 40 | 62 | 44 |
| 1239347 | 71 | 45 | 74 | 48 |
| 1239370 | 87 | 60 | 91 | 65 |
| 1239419 | 107 | 80 | 111 | 83 |
| 1239452 | 71 | 44 | 72 | 46 |
| 1239460 | 84 | 64 | 80 | 61 |
| 1239514 | 101 | 75 | 98 | 74 |
| 1239541 | 80 | 50 | 84 | 51 |
| 1239547 | 81 | 63 | 82 | 65 |
| 1239598 | 94 | 63 | 93 | 64 |
| 1270345 | 79 | 56 | 82 | 60 |
| 1270411 | 74 | 47 | 75 | 52 |
| 1270412 | 75 | 38 | 81 | 41 |

TABLE 68
Reduction of human PRNP RNA in knock-in mice

| | PRNP RNA (% control) | | | |
|---|---|---|---|---|
| Compound | RTS42354 | | RTS42356 | |
| Number | Cortex | Spinal Cord | Cortex | Spinal Cord |
| PBS | 100 | 100 | 100 | 100 |
| 1355710 | 105 | 89 | 97 | 98 |
| 1355711 | 93 | 57 | 80 | 72 |
| 1355712 | 122 | 79 | 91 | 96 |
| 1355713 | 114 | 86 | 97 | 100 |
| 1355714 | 116 | 70 | 94 | 87 |
| 1355715 | 102 | 54 | 75 | 63 |
| 1355716 | 117 | 79 | 83 | 93 |
| 1355717 | 108 | 63 | 68 | 75 |
| 1355718 | 150 | 74 | 100 | 95 |
| 1355719 | 185 | 68 | 114 | 86 |
| 1355720 | 51 | 32 | 26 | 33 |
| 1355721 | 119 | 65 | 63 | 67 |
| 1355722 | 119 | 67 | 64 | 70 |
| 1355723 | 130 | 72 | 73 | 78 |
| 1355724 | 120 | 60 | 68 | 65 |
| 1355725 | 116 | 56 | 64 | 58 |
| 1355726 | 128 | 63 | 85 | 68 |
| 1355727 | 186 | 83 | 112 | 89 |
| 1355728 | 74 | 49 | 60 | 53 |
| 1355729 | 171 | 73 | 117 | 85 |
| 1355730 | 179 | 82 | 115 | 94 |
| 1355731 | 149 | 66 | 104 | 84 |
| 1355732 | 79 | 62 | 83 | 47 |
| 1355733 | 92 | 84 | 92 | 87 |
| 1355734 | 62 | 54 | 59 | 58 |
| 1355735 | 55 | 51 | 51 | 58 |
| 1355736 | 82 | 66 | 82 | 71 |
| 1355737 | 86 | 71 | 89 | 86 |
| 1355738 | 95 | 53 | 77 | 64 |
| 1355739 | 92 | 58 | 74 | 74 |
| 1355740 | 98 | 67 | 81 | 81 |
| 1355741 | 119 | 85 | 91 | 97 |
| 1355742 | 105 | 66 | 75 | 77 |
| 1355743 | 117 | 72 | 88 | 86 |
| 1355744 | 64 | 43 | 44 | 57 |
| 1355745 | 130 | 69 | 93 | 92 |
| 1355746 | 110 | 79 | 67 | 83 |
| 1355747 | 117 | 69 | 63 | 70 |
| 1355748 | 128 | 80 | 71 | 87 |
| 1355749 | 135 | 69 | 78 | 78 |
| 1355750 | 146 | 77 | 90 | 83 |
| 1355751 | 146 | 81 | 92 | 91 |
| 1355752 | 109 | 50 | 67 | 53 |
| 1355753 | 146 | 68 | 94 | 76 |
| 1355754 | 152 | 81 | 107 | 84 |
| 1355755 | 141 | 79 | 96 | 85 |
| 1355756 | 177 | 78 | 118 | 87 |
| 1355757 | 196 | 72 | 129 | 92 |

TABLE 69
Reduction of human PRNP RNA in knock-in mice

| | PRNP RNA (% control) | | | |
|---|---|---|---|---|
| Compound | RTS42354 | | RTS42356 | |
| Number | Cortex | Spinal Cord | Cortex | Spinal Cord |
| PBS | 100 | 100 | 100 | 100 |
| 1393324 | 82 | 56 | 83 | 47 |
| 1393327 | 85 | 55 | 87 | 49 |
| 1393329 | 94 | 56 | 96 | 53 |
| 1393330 | 44 | 30 | 49 | 29 |
| 1393331 | 78 | 57 | 89 | 54 |
| 1393332 | 57 | 29 | 62 | 28 |
| 1393333 | 79 | 64 | 86 | 59 |
| 1393334 | 63 | 41 | 68 | 35 |
| 1393335 | 50 | 30 | 54 | 27 |
| 1393336 | 86 | 84 | 98 | 71 |
| 1393337 | 67 | 56 | 69 | 43 |
| 1393338 | 81 | 76 | 90 | 70 |
| 1393339 | 78 | 65 | 86 | 52 |
| 1393340 | 79 | 79 | 87 | 66 |
| 1393341 | 86 | 85 | 94 | 69 |
| 1393342 | 58 | 46 | 64 | 39 |
| 1394116 | 85 | 80 | 93 | 69 |
| 1394117 | 74 | 60 | 83 | 49 |
| 1394118 | 65 | 51 | 74 | 44 |
| 1394119 | 64 | 51 | 71 | 44 |
| 1394120 | 65 | 50 | 77 | 45 |
| 1394121 | 66 | 54 | 71 | 46 |
| 1394122 | 83 | 53 | 98 | 59 |
| 1394123 | 62 | 45 | 76 | 49 |
| 1394124 | 73 | 35 | 62* | 34* |
| 1394125 | 72 | 55 | 84 | 68 |
| 1394126 | 81 | 72 | 94 | 74 |
| 1394127 | 79 | 58 | 98 | 76 |
| 1394128 | 86 | 61 | 104 | 77 |
| 1394129 | 60 | 51 | 77 | 55 |
| 1394130 | 66 | 40 | 60 | 46 |
| 1394131 | 67 | 47 | 24* | 19* |
| 1394132 | 71 | 55 | 47 | 46 |
| 1394133 | 87 | 72 | 87 | 62 |
| 1394134 | 75 | 51 | 72 | 46 |
| 1394135 | 79 | 60 | 52 | 46 |
| 1394136 | 45 | 32 | 47 | 30 |
| 1394137 | 76 | 66 | 59* | 36* |
| 1394138 | 73 | 62 | 24* | 18* |
| 1394139 | 68 | 58 | 35 | 42 |

TABLE 70
Reduction of human PRNP RNA in knock-in mice

| | PRNP RNA (% control) | | | |
|---|---|---|---|---|
| Compound | RTS42354 | | RTS42356 | |
| Number | Cortex | Spinal Cord | Cortex | Spinal Cord |
| PBS | 100 | 100 | 100 | 100 |
| 1238414 | 90 | 75 | 89 | 72 |
| 1238503 | 68 | 43 | 68 | 42 |
| 1238550 | 58 | 41 | 55 | 41 |
| 1238882 | 71 | 35 | 68 | 38 |
| 1238982 | 86 | 61 | 82 | 57 |
| 1239136 | 59 | 56 | 58 | 57 |
| 1239202 | 77 | 66 | 76 | 64 |
| 1239559 | 70 | 47 | 70 | 47 |
| 1239560 | 81 | 68 | 81 | 65 |
| 1239661 | 63 | 39 | 62 | 38 |
| 1406230 | 77 | 59 | 73 | 52 |
| 1406232 | 50 | 33 | 49 | 32 |
| 1406236 | 86 | 70 | 85 | 66 |
| 1406238 | 65 | 40 | 61 | 39 |
| 1406243 | 54 | 50 | 51 | 48 |
| 1406250 | 99 | 93 | 63 | 91 |
| 1406254 | 60 | 49 | 58 | 44 |
| 1406261 | 56 | 52 | 54 | 47 |
| 1406262 | 38 | 34 | 36 | 31 |
| 1406264 | 85 | 84 | 85 | 80 |
| 1406267 | 69 | 56 | 64 | 49 |
| 1238358 | 63 | 55 | 60 | 51 |
| 1238374 | 51 | 73 | 45 | 64 |
| 1238441 | 89 | 73 | 83 | 70 |
| 1238638 | 81 | 66 | 80 | 66 |
| 1238803 | 72 | 62 | 67 | 60 |
| 1238896 | 51 | 47 | 58 | 46 |
| 1239049 | 68 | 64 | 60 | 60 |
| 1239179 | 78 | 52 | 66 | 49 |
| 1239223 | 79 | 70 | 76 | 67 |
| 1239326 | 68 | 49 | 60 | 49 |
| 1270309 | 68 | 43 | 60 | 36 |
| 1270317 | 66 | 56 | 61 | 56 |
| 1270318 | 62 | 48 | 63 | 46 |
| 1238240 | 54 | 47 | 1* | 4* |
| 1270342 | 54 | 46 | 46 | 43 |

TABLE 71
Reduction of human PRNP RNA in knock-in mice

| PRNP RNA (% control) | |
|---|---|
| RTS42354 | RTS42356 |

| Compound | | Spinal | | Spinal |
|---|---|---|---|---|
| Number | Cortex | Cord | Cortex | Cord |
| PBS | 100 | 100 | 100 | 100 |
| 1270363 | 39 | 29 | 31 | 31 |
| 1411004 | 21 | 13 | 13 | 13 |
| 1411005 | 30 | 20 | 19 | 19 |
| 1411006 | 28 | 14 | 15 | 15 |
| 1411007 | 32 | 21 | 19 | 19 |
| 1411013 | 38 | 26 | 26 | 26 |
| 1411014 | 28 | 13 | 13 | 13 |
| 1411015 | 22 | 13 | 12 | 12 |
| 1411016 | 29 | 22 | 21 | 21 |
| 1270381 | 77 | 51 | 45 | 45 |
| 1270459 | 62 | 52 | 46 | 46 |
| 1270530 | 67 | 55 | 43 | 43 |

TABLE 72
Reduction of human PRNP RNA in knock-in mice

| PRNP RNA (% control) | |
|---|---|
| RTS42354 | RTS42356 |

| Compound | | Spinal | | Spinal |
|---|---|---|---|---|
| Number | Cortex | Cord | Cortex | Cord |
| PBS | 100 | 100 | 100 | 100 |
| 1270342 | 75 | 47 | 73 | 47 |
| 1270363 | 71 | 37 | 76 | 35 |
| 1406232 | 59 | 37 | 60 | 34 |
| 1406254 | 66 | 71 | 69 | 75 |
| 1406261 | 52 | 35 | 51 | 34 |
| 1406262 | 56 | 43 | 54 | 41 |
| 1411004 | 30 | 17 | 29 | 17 |
| 1411005 | 44 | 24 | 46 | 23 |
| 1411006 | 30 | 18 | 31 | 18 |
| 1411007 | 36 | 26 | 38 | 24 |
| 1411013 | 44 | 28 | 44 | 27 |
| 1411014 | 33 | 25 | 34 | 23 |
| 1411015 | 25 | 21 | 24 | 18 |
| 1411016 | 42 | 25 | 44 | 21 |
| 1411017 | 80 | 38 | 76 | 35 |
| 1411018 | 81 | 56 | 79 | 52 |

TABLE 73
Reduction of human PRNP RNA in knock-in mice

| PRNP RNA (% control) | |
|---|---|
| RTS42354 | RTS42356 |

| Compound | | Spinal | | Spinal |
|---|---|---|---|---|
| Number | Cortex | Cord | Cortex | Cord |
| PBS | 100 | 100 | 100 | 100 |
| 1418386 | 35 | 19 | 13* | 8* |
| 1418387 | 53 | 29 | 46 | 28 |
| 1418388 | 68 | 58 | 16* | 15* |
| 1418389 | 76 | 48 | 54 | 46 |
| 1418390 | 68 | 34 | 36* | 20* |
| 1418391 | 67 | 38 | 60* | 35* |
| 1418392 | 63 | 27 | 52* | 25* |
| 1418393 | 68 | 34 | 48* | 25* |
| 1418394 | 97 | 81 | 69 | 66 |
| 1418395 | 74 | 48 | 77 | 49 |
| 1418396 | 84 | 60 | 80 | 49 |
| 1418397 | 87 | 61 | 76 | 57 |
| 1418398 | 95 | 80 | 89 | 73 |
| 1418399 | 93 | 64 | 90 | 62 |
| 1418400 | 99 | 71 | 94 | 66 |
| 1418401 | 94 | 68 | 91 | 65 |
| 1418402 | 93 | 54 | 84 | 54 |
| 1418403 | 114 | 94 | 105 | 89 |
| 1418404 | 82 | 60 | 85 | 57 |
| 1418405 | 103 | 71 | 92 | 69 |
| 1418406 | 91 | 77 | 79 | 69 |
| 1418416 | 60 | 35 | 37* | 25* |
| 1418417 | 62 | 43 | 62 | 48 |
| 1418418 | 44 | 26 | 41 | 26 |
| 1418419 | 57 | 34 | 52 | 32 |
| 1418420 | 19 | 12 | 18 | 14 |
| 1418421 | 45 | 34 | 45 | 33 |
| 1418422 | 50 | 27 | 50 | 29 |

TABLE 74
Reduction of human PRNP RNA in knock-in mice

| PRNP RNA (% control) | |
|---|---|
| RTS42354 | RTS42356 |

| Compound | | Spinal | | Spinal |
|---|---|---|---|---|
| Number | Cortex | Cord | Cortex | Cord |
| PBS | 100 | 100 | 100 | 100 |
| 1418407 | 82 | 68 | 91 | 72 |
| 1418408 | 86 | 85 | 101 | 91 |
| 1418409 | 94 | 95 | 105 | 86 |
| 1418410 | 92 | 85 | 98 | 80 |
| 1418411 | 85 | 67 | 84 | 65 |
| 1418412 | 55 | 39 | 56 | 40 |
| 1418413 | 78 | 45 | 82 | 44 |
| 1418414 | 69 | 44 | 70 | 45 |
| 1418415 | 76 | 45 | 79 | 43 |
| 1418423 | 70 | 38 | 75 | 36 |
| 1418424 | 33 | 21 | 32 | 20 |
| 1418425 | 39 | 22 | 37 | 21 |
| 1418426 | 36 | 31 | 35 | 29 |
| 1423120 | 45 | 29 | 43 | 30 |
| 1423121 | 28 | 23 | 27 | 22 |
| 1423122 | 31 | 14 | 29 | 15 |
| 1423123 | 30 | 20 | 30 | 19 |
| 1423124 | 46 | 28 | 43 | 27 |
| 1423125 | 79 | 48 | 82 | 51 |
| 1423126 | 39 | 29 | 38 | 28 |
| 1423127 | 58 | 40 | 56 | 39 |

TABLE 75
Reduction of human PRNP RNA in knock-in mice

| PRNP RNA (% control) | |
|---|---|
| RTS42354 | RTS42356 |

| Compound | | Spinal | | Spinal |
|---|---|---|---|---|
| Number | Cortex | Cord | Cortex | Cord |
| PBS | 100 | 100 | 100 | 100 |
| 1201005 | 56 | 32 | 57 | 24 |
| 1238994 | 46 | 21 | 48 | 22 |
| 1239544 | 52 | 28 | 34 | 17 |
| 1270400 | 57 | 34 | 59 | 28 |
| 1355706 | 55 | 12 | 35 | 12 |
| 1355721 | 98 | 59 | 90 | 57 |
| 1355745 | 83 | 96 | 90 | 65 |
| 1373021 | 36 | 17 | 26 | 14 |
| 1373022 | 33 | 16 | 28 | 16 |
| 1373023 | 27 | 8 | 17 | 10 |
| 1373043 | 43 | 17 | 20* | 9* |
| 1373045 | 66 | 50 | 24* | 13* |
| 1373050 | 62 | 50 | 45 | 32 |
| 1373053 | 32 | 18 | 16* | 10* |
| 1373054 | 72 | 38 | 35 | 13 |
| 1373057 | 62 | 24 | 49 | 12 |
| 1373061 | 94 | 77 | 60 | 43 |

### Example 6: Potency of Modified Oligonucleotides Complementary to Human PRNP in Knock-In Mice

[0556] Modified oligonucleotides described above were tested in human PRNP knock-in mouse model as described above.

### Treatment

[0557] The PRNP knock-in mice were divided into groups of 3-4 mice each. Each mouse received a single ICV bolus of modified oligonucleotide at the doses indicated in tables below. A group of 4 mice received PBS as a negative control for each study. Each table below represents an independent study.

### RNA Analysis

[0558] Two weeks post treatment, mice were sacrificed and RNA was extracted from cortical brain tissue, spinal cord, and brain stem for RTPCR analysis to measure amount of PRNP RNA using human primer probe set RTS42356 (described herein above). In some cases, levels of PRNP RNA in hippocampus were examined as well. Results are presented as percent human PRNP RNA relative to PBS control, normalized to mouse cyclophilin A. Cyclophilin A was amplified using primer probe set m_cyclo24 (described herein above). N/A indicates that a value is not available.

[0559] As shown in the table below, treatment with modified oligonucleotides resulted in reduction of PRNP RNA in comparison to the PBS control.

TABLE 76
Reduction of human PRNP RNA in knock-in mice

| | | CORTEX | | SPINAL CORD | | BRAIN STEM | |
|---|---|---|---|---|---|---|---|
| | | PRNP | | PRNP | | PRNP | |
| | | RNA | | RNA | | RNA | |
| Compound | Dose | (% | ED50 | (% | ED50 | (% | ED50 |
| No. | (μg) | control) | (μg) | control) | (μg) | control) | (μg) |
| 1201142 | 10 | 94 | 196 | 87 | 37 | 81 | 46 |
| | 30 | 97 | | 51 | | 66 | |
| | 100 | 70 | | 34 | | 44 | |
| | 300 | 44 | | 24 | | 26 | |
| | 700 | 39 | | 21 | | 23 | |
| 1270232 | 10 | 89 | 102 | 68 | 22 | 80 | 36 |
| | 30 | 69 | | 49 | | 62 | |
| | 100 | 65 | | 32 | | 39 | |
| | 300 | 29 | | 16 | | 18 | |
| | 700 | 19 | | 15 | | 19 | |
| 1270458 | 10 | 89 | 143 | 87 | 36 | 82 | 57 |
| | 30 | 82 | | 45 | | 61 | |
| | 100 | 56 | | 41 | | 45 | |
| | 300 | 45 | | 25 | | 34 | |
| | 700 | 27 | | 24 | | 27 | |

TABLE 77
Reduction of human PRNP RNA in knock-in mice

| | | CORTEX | | SPINAL CORD | | BRAIN STEM | |
|---|---|---|---|---|---|---|---|
| | | PRNP | | PRNP | | PRNP | |
| | | RNA | | RNA | | RNA | |
| Compound | Dose | (% | ED50 | (% | ED50 | (% | ED50 |
| No. | (μg) | control) | (μg) | control) | (μg) | control) | (μg) |
| 1238994 | 10 | 95 | 124 | 82 | 44 | 73 | 33 |
| | 30 | 73 | | 64 | | 57 | |
| | 100 | 63 | | 33 | | 39 | |
| | 300 | 37 | | 28 | | 25 | |
| | 700 | 28 | | 22 | | 18 | |
| 1270400 | 10 | 89 | 262 | 63 | 24 | 65 | 29 |
| | 30 | 94 | | 55 | | 60 | |
| | 100 | 62 | | 40 | | 38 | |
| | 300 | 48 | | 22 | | 24 | |
| | 700 | 47 | | 20 | | 23 | |
| 1355721 | 10 | 104 | >700 | 86 | 374 | 78 | 637 |
| | 30 | 84 | | 74 | | 78 | |
| | 100 | 84 | | 66 | | 73 | |
| | 300 | 75 | | 58 | | 60 | |
| | 700 | 75 | | 50 | | 52 | |

TABLE 78
Reduction of human PRNP RNA in knock-in mice

| | | CORTEX | | SPINAL CORD | | BRAIN STEM | |
|---|---|---|---|---|---|---|---|
| | | PRNP | | PRNP | | PRNP | |
| | | RNA | | RNA | | RNA | |
| Compound | Dose | (% | ED50 | (% | ED50 | (% | ED50 |
| No. | (μg) | control) | (μg) | control) | (μg) | control) | (μg) |
| 1239544 | 10 | 103 | 310 | 77 | 70 | 90 | 91 |
| | 30 | 105 | | 76 | | 74 | |
| | 100 | 75 | | 46 | | 50 | |
| | 300 | 62 | | 32 | | 35 | |
| | 700 | 34 | | 24 | | 27 | |
| 1355706 | 10 | 95 | 105 | 75 | 45 | 76 | 33 |
| | 30 | 81 | | 78 | | 61 | |
| | 100 | 59 | | 28 | | 38 | |
| | 300 | 28 | | 17 | | 14 | |
| | 700 | 19 | | 14 | | 11 | |
| 1373021 | 10 | 99 | 118 | 98 | 53 | 85 | 40 |
| | 30 | 82 | | 65 | | 60 | |
| | 100 | 62 | | 40 | | 34 | |
| | 300 | 30 | | 17 | | 18 | |
| | 700 | 18 | | 9 | | 12 | |

TABLES 79
Reduction of human PRNP RNA in knock-in mice

| | | CORTEX | | SPINAL CORD | | BRAIN STEM | | HIPPOCAMPUS | |
|---|---|---|---|---|---|---|---|---|---|
| Compound | Dose | PRNP RNA | ED50 | PRNP RNA | ED50 | PRNP RNA | ED50 | PRNP RNA | ED50 |
| No. | (μg) | (% control) | (μg) | (% control) | (μg) | (% control) | (μg) | (% control) | (μg) |
| 1355720 | 30 | 84 | 88 | 54 | 27 | 53 | 27 | 68 | 57 |
| | 100 | 49 | | 29 | | 39 | | 43 | |
| | 300 | 27 | | 19 | | 23 | | 25 | |
| | 700 | 17 | | 17 | | 21 | | 21 | |
| 1373022 | 10 | 95 | 126 | 79 | 50 | 79 | 41 | N/A | 98 |
| | 30 | 77 | | 61 | | 64 | | 75 | |
| | 100 | 67 | | 40 | | 45 | | 59 | |
| | 300 | 34 | | 23 | | 27 | | 30 | |
| | 700 | 20 | | 14 | | 19 | | 22 | |
| 1373023 | 10 | 72 | 69 | 88 | 27 | 76 | 30 | N/A | 49 |
| | 30 | 73 | | 59 | | 56 | | 69 | |
| | 100 | 49 | | 26 | | 32 | | 36 | |
| | 300 | 25 | | 14 | | 17 | | 21 | |
| | 700 | 11 | | 10 | | 13 | | 12 | |
| 1373057 | 10 | 88 | 98 | 100 | 44 | 86 | 51 | N/A | 55 |
| | 30 | 74 | | 65 | | 68 | | 65 | |
| | 100 | 55 | | 33 | | 38 | | 46 | |
| | 300 | 34 | | 19 | | 24 | | 27 | |
| | 700 | 18 | | 16 | | 17 | | 20 | |

TABLES 80
Reduction of human PRNP RNA in knock-in mice

| | | CORTEX | | SPINAL CORD | | BRAIN STEM | | HIPPOCAMPUS | |
|---|---|---|---|---|---|---|---|---|---|
| Compound | Dose | PRNP RNA | ED50 | PRNP RNA | ED50 | PRNP RNA | ED50 | PRNP RNA | ED50 |
| No. | (μg) | (% control) | (μg) | (% control) | (μg) | (% control) | (μg) | (% control) | (μg) |
| 1411016 | 10 | 95 | 80 | 86 | 44 | 85 | 51 | N/A | 82 |
| | 30 | 84 | | 56 | | 62 | | 99 | |
| | 100 | 45 | | 41 | | 42 | | 81 | |
| | 300 | 29 | | 26 | | 27 | | 39 | |
| | 700 | 26 | | 23 | | 22 | | 31 | |

### Example 7: Tolerability of Modified Oligonucleotides Complementary to Human PRNP in Wild-Type Mice, 3-Hour Study

[0560] Modified oligonucleotides described above were tested in wild-type female C57/Bl6 mice to assess the tolerability of the oligonucleotides. Also tested in one study was Comparator Compound No. 169753, described herein above and in WO2010/019270. Wild-type female C57/Bl6 mice each received a single JCV dose of 700 μg of modified oligonucleotide listed in the table below. Each treatment group consisted of 2-4 mice. A group of 4 mice received PBS as a negative control for each study (identified in separate tables below). At 3 hours post-injection, mice were evaluated according to seven different criteria. The criteria are (1) the mouse was bright, alert, and responsive; (2) the mouse was standing or hunched without stimuli; (3) the mouse showed any movement without stimuli; (4) the mouse demonstrated forward movement after it was lifted; (5) the mouse demonstrated any movement after it was lifted; (6) the mouse irsponded to tail pinching; (7) regular breathing. For each of the 7 criteria, a mouse was given a sub-score of 0 if it met the criteria and 1 if it did not (the functional observational battery score or FOB). After all 7 criteria were evaluated, the scores were summed for each mouse and the summed scores for each animal are reported individually. The results are presented in the tables below.

TABLE 81
Tolerability scores in mice at 700 μg dose

| Compound Number | 3 hr. FOB |
|---|---|
| PBS | 0, 0, 0, 0 |
| 1238169 | 1, 3, 1, 3 |
| 1200973 | 4, 4, 5, 5 |
| 1201005 | 5, 5, 7, 4 |
| 1201010 | 4, 4, 4, 4 |
| 1201142 | 1, 1, 2, 2 |
| 1201293 | 4, 4, 3, 6 |
| 1238167 | 1, 1, 1, 1 |
| 1238168 | 1, 1, 1, 1 |
| 1238339 | 5, 5, 5, 5 |
| 1238467 | 6, 6, 6, 6 |
| 1238497 | 4, 4, 4, 4 |
| 1238498 | 3, 3, 3, 3 |
| 1238507 | 6, 6, 6, 6 |
| 1238517 | 5, 5, 5, 5 |
| 1238812 | 1, 1, 1, 1 |
| 1238814 | 0, 0, 0, 0 |
| 1238987 | 1, 1, 1, 1 |
| 1238996 | 1, 1, 1, 1 |
| 1239009 | 5, 5, 5, 5 |
| 1239031 | 4, 4, 5, 5 |
| 1239234 | 1, 1, 1, 1 |
| 1239293 | 5, 4, 4, 5 |
| 1239544 | 3, 4, 4, 3 |

TABLE 82
Tolerability scores in mice at 700 μg dose

| Compound Number | 3 hr. FOB |
|---|---|
| PBS | 0, 0, 0, 0 |
| 1239030 | 1, 1, 1, 1 |
| 1270228 | 6, 6, 6, 5 |
| 1270230 | 3, 3, 3, 3 |
| 1270231 | 1, 1, 1, 1 |
| 1270232 | 2, 2, 2, 2 |
| 1270406 | 1, 1, 1, 1 |
| 1270457 | 1, 1, 1, 1 |
| 1270458 | 1, 1, 1, 1 |
| 1335684 | 1, 0, 0, 0 |
| 1335686 | 0, 0, 0, 0 |
| 1335688 | 1, 1, 0, 0 |

TABLE 83
Tolerability scores in mice at 700 μg dose

| Compound Number | 3 hr. FOB |
|---|---|
| PBS | 0, 0, 0, 0 |
| 169753 | 6, 3, 4, 4 |
| 1238994 | 0, 0, 0, 0 |
| 1239235 | 0, 0, 0, 0 |
| 1270233 | 2, 1, 1, 3 |
| 1270281 | 4, 4, 3, 1 |
| 1270400 | 0, 1, 0, 1 |
| 1355706 | 4, 5, 4, 3 |
| 1355708 | 3, 5, 4, 3 |

TABLE 84
Tolerability scores in mice at 700 μg dose

| Compound Number | 3 hr. FOB |
|---|---|
| PBS | 0, 0, 0, 0 |
| 1201004 | 3, 3, 2, 2 |
| 1201006 | 3, 4, 4, 4 |
| 1201007 | 4, 3, 4, 4 |
| 1201141 | 1, 2, 1, 2 |
| 1238202 | 0, 0, 0, 0 |
| 1239543 | 1, 1, 2, 1 |
| 1239545 | 0, 0, 0, 0 |
| 1239546 | 1, 0, 1, 0 |
| 1239547 | 0, 0, 0, 0 |
| 1373020 | 4, 4, 4, 3 |
| 1373021 | 3, 3, 2, 2 |
| 1373022 | 2, 2, 2, 1 |
| 1373023 | 0, 0, 0, 0 |
| 1373024 | 1, 1, 1, 0 |
| 1373025 | 0, 0, 0, 1 |
| 1373026 | 2, 1, 1, 1 |
| 1373027 | 1, 2, 3, 2 |
| 1373028 | 0, 0, 0, 0 |
| 1373029 | 1, 2, 1, 1 |
| 1373030 | 1, 2, 2, 1 |
| 1373031 | 1, 1, 1, 1 |
| 1373032 | 0, 0, 1, 0 |
| 1373033 | 3, 2, 4, 4 |

TABLE 85
Tolerability scores in mice at 700 μg dose

| Compound Number | 3 hr. FOB |
|---|---|
| PBS | 0, 0, 0, 0 |
| 1373057 | 0, 0, 0, 0 |
| 1373058 | 0, 0, 3, 0 |
| 1373059 | 0, 0, 0, 0 |
| 1373060 | 0, 0, 0, 4 |
| 1373061 | 0, 0, 0, 0 |
| 1373062 | 1, 4, 1, 1 |
| 1373063 | 0, 0, 0, 0 |
| 1373064 | 0, 0, 0, 0 |
| 1373065 | 0, 0, 0, 0 |
| 1373066 | 0, 0, 0, 0 |
| 1373067 | 0, 1, 0, 0 |
| 1373068 | 0, 0, 0, 0 |
| 1373069 | 0, 0, 0, 0 |
| 1373070 | 6, 5, 5, 5 |
| 1373071 | 0, 0, 0, 0 |
| 1373072 | 6, 4, 4, 4 |
| 1373073 | 0, 0, 0, 0 |
| 1373074 | 1, 1, 0, 1 |
| 1373075 | 0, 0, 0, 0 |
| 1373076 | 0, 0, 0, 0 |
| 1373077 | 0, 0, 0, 0 |
| 1373078 | 4, 3, 4, 4 |

TABLE 86
Tolerability scores in mice at 700 μg dose

| Compound Number | 3 hr. FOB |
|---|---|
| PBS | 0, 0, 0, 0 |
| 1201157 | 3, 3, 3, 1 |
| 1201255 | 7, 6, 6, 7 |
| 1201288 | 3, 6, 6, 3 |
| 1201294 | 6, 7, 4, 5 |
| 1238259 | 1, 1, 1, 1 |
| 1238264 | 1, 1, 1, 1 |
| 1238270 | 6, 7, 7, 6 |
| 1238274 | 3, 3, 3, 1 |
| 1238323 | 1, 3, 3, 2 |
| 1238329 | 4, 4, 4, 5 |
| 1238330 | 7, 6, 7, 7 |
| 1238331 | 7, 7, 7, 7 |
| 1238341 | 4, 4, 6, 3 |
| 1238437 | 0, 1, 0, 1 |
| 1238440 | 1, 1, 1, 1 |
| 1238449 | 4, 5, 4, 6 |
| 1238580 | 2, 5, 3, 2 |
| 1238688 | 1, 1, 1, 1 |
| 1238914 | 1, 1, 1, 1 |
| 1200977 | 6, 4, 7, 4 |
| 1201138 | 1, 3, 4, 2 |
| 1201145 | 3, 3, 4, 6 |
| 1238170 | 0, 0, 0, 0 |

TABLE 87
Tolerability scores in mice at 700 μg dose

| Compound Number | 3 hr. FOB |
|---|---|
| PBS | 0, 0, 0, 0 |
| 1238600 | 0, 0, 0, 0 |
| 1238491 | 1, 1, 1, 1 |
| 1239162 | 0, 0, 0, 0 |
| 1238813 | 0, 0, 0, 0 |
| 1238889 | 4, 1, 4, 4 |
| 1238892 | 0, 0, 0, 0 |
| 1238975 | 1, 1, 1, 1 |
| 1238992 | 1, 1, 1, 1 |
| 1239046 | 1, 1, 1, 1 |
| 1239146 | 4, 4, 3, 4 |
| 1239260 | 1, 1, 1, 1 |
| 1239263 | 5, 5, 5, 5 |
| 1239448 | 6, 6, 6, 6 |
| 1239682 | 7, 4, 4, 4 |
| 1239694 | 4, 4, 4, 4 |
| 1238322 | 1, 1, 1, 1 |
| 1238324 | 0, 0, 0, 0 |
| 1238327 | 1, 1, 1, 1 |
| 1238359 | 5, 5, 5, 5 |
| 1238373 | 3, 3, 3, 1 |
| 1238460 | 1, 1, 1, 1 |
| 1238554 | 6, 6, 5, 5 |
| 1238572 | 1, 1, 1, 1 |

TABLE 88
Tolerability scores in mice at 700 μg dose

| Compound Number | 3 hr. FOB |
|---|---|
| PBS | 0, 0, 0, 0 |
| 1238255 | 2, 1, 1, 1 |
| 1238285 | 1, 1, 3, 3 |
| 1238325 | 0, 0, 0, 0 |
| 1238361 | 0, 0, 0, 0 |
| 1238370 | 7, 7, 4, 5 |
| 1238404 | 0, 0, 1, 0 |
| 1238409 | 6, 6, 6, 6 |
| 1238444 | 7, 5, 6, 6 |
| 1238500 | 6, 6, 7, 6 |
| 1238582 | 5, 5, 5, 5 |
| 1238616 | 0, 0, 0, 0 |
| 1238645 | 0, 0, 0, 0 |
| 1238797 | 0, 0, 0, 0 |
| 1238802 | 1, 3, 6, 3 |
| 1238837 | 4, 7, 4, 4 |
| 1238838 | 6, 7, 6, 6 |
| 1238863 | 7, 7, 6, 6 |
| 1238990 | 7, 4, 4, 4 |
| 1239052 | 1, 1, 1, 0 |
| 1239063 | 2, 3, 2, 3 |
| 1239064 | 0, 0, 0, 0 |
| 1239550 | 4, 4, 4, 3 |
| 1239607 | 4, 4, 4, 4 |

TABLE 89
Tolerability scores in mice at 700 μg dose

| Compound Number | 3 hr. FOB |
|---|---|
| PBS | 0, 0, 0, 0 |
| 1238244 | 0, 0, 0, 0 |
| 1238410 | 4, 4, 4, 0 |
| 1238490 | 0, 0, 0, 0 |
| 1238632 | 0, 0, 0, 0 |
| 1238836 | 1, 1, 0, 0 |
| 1239027 | 0, 0, 0, 0 |
| 1239231 | 0, 0, 0, 0 |
| 1239250 | 0, 0, 0, 0 |
| 1239329 | 0, 0, 0, 0 |
| 1239345 | 0, 0, 0, 0 |
| 1239352 | 0, 0, 0, 0 |
| 1239394 | 0, 0, 0, 0 |

TABLE 90
Tolerability scores in mice at 700 μg dose

| Compound Number | 3 hr. FOB |
|---|---|
| PBS | 0, 0, 0, 0 |
| 1201095 | 4, 4, 3, 3 |
| 1201124 | 6, 5, 5, 6 |
| 1201276 | 6, 4, 4, 4 |
| 1238293 | 5, 6, 6, 6 |
| 1238316 | 4, 4, 3, 4 |
| 1238334 | 6, 6, 7, 6 |
| 1238351 | 2, 3, 3, 2 |
| 1238369 | 3, 2, 2, 2 |
| 1238371 | 3, 4, 2, 3 |
| 1238402 | 1, 1, 1, 1 |
| 1238501 | 5, 5, 6, 5 |
| 1238506 | 2, 2, 2, 3 |
| 1238805 | 4, 5, 4, 6 |
| 1238864 | 6, 5, 5, 5 |
| 1238947 | 4, 4, 4, 5 |
| 1238974 | 5, 6, 6, 4 |
| 1238981 | 2, 2, 2, 2 |
| 1239010 | 4, 4, 4, 4 |
| 1239222 | 4, 6, 4, 4 |
| 1239792 | 2, 2, 2, 2 |
| 1201098 | 4, 3, 3, 4 |
| 1201120 | 2, 4, 3, 2 |
| 1201143 | 3, 3, 3, 3 |

TABLE 91
Tolerability scores in mice at 700 μg dose

| Compound Number | 3 hr. FOB |
|---|---|
| PBS | 0, 0, 0, 0 |
| 1355721 | 0, 0, 0, 0 |
| 1355745 | 2, 2, 3, 3 |
| 1355736 | 3, 3, 3, 3 |

TABLE 92
Tolerability scores in mice at 700 μg dose

| Compound Number | 3 hr. FOB |
|---|---|
| PBS | 0, 0, 0, 0 |
| 1373034 | 0, 0, 0, 0 |
| 1373035 | 3, 1, 1, 4 |
| 1373036 | 0, 4, 0, 0 |
| 1373037 | 5, 4, 1, 3 |
| 1373038 | 0, 0, 0, 0 |
| 1373039 | 1, 4, 1, 4 |
| 1373040 | 0, 0, 0, 0 |
| 1373041 | 0, 0, 0, 0 |
| 1373042 | 3, 1, 1, 1 |
| 1373043 | 3, 4, 4, 1 |
| 1373044 | 1, 0, 0, 0 |
| 1373045 | 4, 4, 5, 4 |
| 1373046 | 6, 4, 5, 4 |
| 1373047 | 0, 0, 0, 0 |
| 1373048 | 6, 6, 6, 6 |
| 1373049 | 0, 0, 0, 0 |
| 1373050 | 0, 0, 0, 0 |
| 1373051 | 0, 2, 2, 0 |
| 1373052 | 6, 5, 3, 4 |
| 1373053 | 4, 0, 0, 0 |
| 1373054 | 0, 0, 0, 0 |
| 1373055 | 3, 4, 1, 1 |
| 1373056 | 0, 0, 0, 0 |

TABLE 93
Tolerability scores in mice at 700 μg dose

| Compound Number | 3 hr. FOB |
|---|---|
| PBS | 0, 0, 0, 0 |
| 1394131 | 1, 2, 1, 1 |
| 1394138 | 0, 0, 0, 0 |
| 1394139 | 0, 0, 0, 0 |

TABLE 94
Tolerability scores in mice at 700 μg dose

| Compound Number | 3 hr. FOB |
|---|---|
| PBS | 0, 0, 0, 0 |
| 1411017 | 0, 0, 0, 0 |
| 1411018 | 0, 0, 0, 0 |
| 1406232 | 0, 0, 0, 0 |
| 1406254 | 0, 0, 0, 0 |
| 1406261 | 3, 3, 3, 3 |
| 1406262 | 0, 0, 0, 0 |
| 1270342 | 2, 3, 1, 1 |
| 1270363 | 6, 6, 6, 6 |
| 1411004 | 7, 6, 6, 6 |
| 1411005 | 3, 3, 3, 3 |
| 1411006 | 6, 6, 5, 5 |
| 1411007 | 0, 0, 0, 0 |
| 1411013 | 4, 4, 4, 4 |
| 1411014 | 3, 4, 4, 4 |
| 1411015 | 4, 4, 5, 5 |
| 1411016 | 2, 1, 2, 2 |

### Example 8: Tolerability of Modified Oligonucleotides Complementary to Human PRNP in Rats at 3 Hours Post Dosing, 3 mg Dose

[0561] Modified oligonucleotides described above were tested in rats to assess the tolerability of the oligonucleotides. Sprague Dawley rats each received a single intrathecal (IT) dose of 3 mg of oligonucleotide listed in the table below. Also tested in one study was Comparator Compound No. 169753, described herein above and in WO2010/019270. Each treatment group consisted of 2-4 rats. A group of 4 rats received PBS as a negative control in each study (represented in separate tables below). At 3 hours post-injection, movement in 7 different parts of the body were evaluated for each rat. The 7 body parts are (1) the rat's tail; (2) the rat's posterior posture; (3) the rat's hind limbs; (4) the rat's hind paws; (5) the rat's forepaws; (6) the rat's anterior posture; (7) the rat's head. For each of the 7 different body parts, each rat was given a sub-score of 0 if the body part was moving or 1 if the body part was paralyzed (the functional observational battery score or FOB). After each of the 7 body parts were evaluated, the sub-scores were summed for each rat and then summed scores were reported for each individual animal. For example, if a rat's tail, head, and all other evaluated body parts were moving 3 hours after the 3 mg IT dose, it would get a summed score of 0. If another rat was not moving its tail 3 hours after the 3 mg IT dose but all other evaluated body parts were moving, it would receive a score of 1.

TABLE 95
Tolerability scores in rats at 3 mg dose

| Compound Number | 3 hr. FOB |
|---|---|
| PBS | 0, 0, 0, 0 |
| 1200973 | 4, 4, 5, 5 |
| 1201005 | 4, 4, 5, 4 |
| 1201142 | 1, 4, 2, 2 |
| 1238167 | 4, 1, 4, 4 |
| 1238168 | 2, 2, 3, 1 |
| 1238169 | 5, 5, 4, 4 |
| 1238325 | 0, 0, 0, 0 |
| 1238498 | 5, 5, 2, 5 |
| 1238507 | 5, 6, 5, 6 |
| 1238517 | 6, 5, 6, 6 |
| 1238797 | 0, 2, 1, 1 |
| 1238802 | 5, 4, 6, 5 |
| 1238812 | 3, 2, 1, 1 |
| 1238837 | 0, 3, 0, 5 |
| 1238838 | 6, 6, 6, 6 |
| 1238863 | 6, 6, 6, 6 |
| 1238987 | 5, 4, 5, 5 |
| 1239009 | 5, 5, 4, 5 |
| 1239052 | 2, 3, 3, 3 |
| 1239234 | 2, 1, 1, 2 |
| 1239544 | 5, 4, 2, 0 |
| 1239682 | 0, 2, 2, 2 |
| 1239694 | 5, 2, 3, 3 |

TABLE 96
Tolerability scores in rats at 3 mg dose

| Compound | 3 hr. |
|---|---|
| Number | FOB |
| PBS | 0, 0, 1, 0 |
| 1239030 | 1, 0, 0, 0 |
| 1270228 | 5, 5, 4, 4 |
| 1270230 | 0, 0, 1, 3 |
| 1270231 | 0, 1, 3, 3 |
| 1270232 | 3, 3, 3, 3 |
| 1270406 | 0, 2, 0, 0 |
| 1270457 | 3, 2, 2, 0 |
| 1270458 | 0, 1, 0, 0 |
| 1335684 | 3, 2, 0, 2 |
| 1335686 | 0, 0, 0, 0 |
| 1335688 | 0, 0, 0, 0 |

TABLE 97
Tolerability scores in rats at 3 mg dose

| Compound | 3 hr. |
|---|---|
| Number | FOB |
| PBS | 0, 0, 0, 0 |
| 1201004 | 4, 4, 4, 4 |
| 1201006 | 5, 0, 6, 0 |
| 1201007 | 6, 5, 5, 5 |
| 1201141 | 0, 4, 4, 4 |
| 1238202 | 3, 3, 2, 0 |
| 1239543 | 3, 3, 3, 3 |
| 1239545 | 1, 1, 1, 2 |
| 1239546 | 2, 2, 2, 1 |
| 1239547 | 1, 0, 1, 1 |
| 1373020 | 5, 5, 5, 4 |
| 1373021 | 4, 4, 0, 4 |
| 1373022 | 3, 3, 0, 0 |
| 1373023 | 1, 1, 2, 1 |
| 1373024 | 1, 1, 0, 0 |
| 1373025 | 1, 0, 0, 0 |
| 1373026 | 1, 1, 2, 1 |
| 1373027 | 2, 2, 2, 0 |
| 1373028 | 0, 0, 0, 0 |
| 1373029 | 2, 2, 2, 3 |
| 1373030 | 2, 2, 3, 2 |

TABLE 98
Tolerability scores in rats at 3 mg dose

| Compound | 3 hr. |
|---|---|
| Number | FOB |
| PBS | 0, 0, 0, 0 |
| 1373057 | 0, 2, 1, 0 |
| 1373058 | 2, 3, 3, 3 |
| 1373059 | 3, 3, 3, 0 |
| 1373060 | 3, 3, 3, 2 |
| 1373061 | 3, 2, 3, 3 |
| 1373062 | 0, 3, 3, 3 |
| 1373063 | 0, 0, 0, 1 |
| 1373064 | 2, 2, 2, 2 |
| 1373065 | 1, 2, 2, 2 |
| 1373066 | 0, 0, 0, 0 |
| 1373067 | 0, 2, 2, 2 |
| 1373068 | 0, 0, 0, 0 |
| 1373069 | 0, 0, 0, 0 |
| 1373071 | 0, 0, 0, 0 |
| 1373073 | 0, 0, 0, 0 |
| 1373074 | 3, 3, 2, 0 |
| 1373075 | 2, 2, 3, 3 |
| 1373076 | 0, 0, 0, 0 |
| 1373077 | 0, 0, 0, 0 |
| 1373078 | 4, 4, 3, 2 |

TABLE 99
Tolerability scores in rats at 3 mg dose

| Compound | 3 hr. |
|---|---|
| Number | FOB |
| PBS | 0, 0, 0, 0 |
| 1201154 | 6, 6, 4, 0 |
| 1201293 | 4, 4, 4, 4 |
| 1238339 | 0, 3, 0, 3 |
| 1238351 | 0, 3, 2, 0 |
| 1238361 | 0, 0, 1, 1 |
| 1238402 | 0, 1, 1, 1 |
| 1238404 | 1, 1, 1, 1 |
| 1238500 | 6, 4, 4, 3 |
| 1238501 | 3, 4, 5, 0 |
| 1238506 | 3, 3, 3, 3 |
| 1238805 | 6, 3, 4, 5 |
| 1238814 | 1, 1 |
| 1238864 | 4, 3, 3, 3 |
| 1238947 | 6, 0, 0, 7 |
| 1238974 | 4, 5, 0, 4 |
| 1238990 | 5, 3, 4, 0 |
| 1238996 | 0, 4, 5, 3 |
| 1239010 | 4, 5, 5, 5 |
| 1239031 | 3, 2, 3, 2 |
| 1239063 | 4, 4, 3, 1 |
| 1239222 | 6, 6, 6, 5 |
| 1239293 | 5, 0, 0, 6 |
| 1239396 | 4, 3, 5, 3 |

TABLE 100
Tolerability scores in rats at 3 mg dose

| Compound | 3 hr. |
|---|---|
| Number | FOB |
| PBS | 0, 0, 0, 0 |
| 1201255 | 6, 5, 5, 6 |
| 1201288 | 5, 5, 5, 5 |
| 1238264 | 4, 5, 5, 5 |
| 1238270 | 7, 6, 0, 6 |
| 1238274 | 5, 5, 5, 5 |
| 1238293 | 5, 6, 6, 6 |
| 1238316 | 0, 5, 0, 5 |
| 1238323 | 1, 5, 5, 5 |
| 1238329 | 6, 6, 5, 6 |
| 1238330 | 6, 5, 6, 6 |
| 1238331 | 2, 6, 6, 6 |
| 1238341 | 6, 6, 5, 6 |
| 1238369 | 5, 5, 3, 5 |
| 1238437 | 4, 4, 4, 0 |
| 1238449 | 6, 0, 6, 0 |
| 1238580 | 3, 0, 2, 0 |
| 1238914 | 4, 0, 3, 3 |
| 1239064 | 0, 2, 2, 2 |
| 1239329 | 3, 3, 0, 3 |
| 1239352 | 4, 2, 4, 3 |
| 1239607 | 5, 5, 0, 0 |

TABLE 101
Tolerability scores in rats at 3 mg dose

| Compound | 3 hr. |
|---|---|
| Number | FOB |
| PBS | 0, 0, 0, 0 |
| 1200977 | 2, 6, 6, 6 |
| 1238170 | 3, 2, 0, 2 |
| 1238244 | 0, 4, 4, 3 |
| 1238410 | 3, 3, 3, 3 |
| 1238490 | 2, 2, 2, 2 |
| 1239027 | 2, 2, 2, 2 |
| 1239250 | 2, 2, 2, 2 |

TABLE 102
Tolerability scores in rats at 3 mg dose

| Compound | 3 hr. |
|---|---|
| Number | FOB |
| PBS | 0, 0, 0, 1 |
| 1238322 | 3, 3, 3, 3 |
| 1238324 | 0, 0, 0, 0 |
| 1238327 | 2, 2, 3, 0 |
| 1238359 | 0, 0, 0, 0 |
| 1238373 | 2, 2, 1, 1 |
| 1238460 | 2, 2, 2, 2 |
| 1238491 | 2, 0, 1, 1 |
| 1238554 | 2, 4, 4, 3 |
| 1238572 | 2, 2, 2, 2 |
| 1238600 | 0, 0, 0, 0 |
| 1238813 | 0, 1, 0, 0 |
| 1238889 | 0, 4, 1, 3 |
| 1238892 | 0, 0, 0, 0 |
| 1238975 | 0, 3, 2, 2 |
| 1238992 | 1, 2, 2, 1 |
| 1239046 | 2, 1, 1, 1 |
| 1239146 | 3, 3, 4, 1 |
| 1239162 | 1, 0, 1, 2 |
| 1239260 | 3, 3, 3, 2 |
| 1239263 | 3, 3, 4, 4 |
| 1239448 | 4, 0, 4, 3 |

TABLE 103
Tolerability scores in rats at 3 mg dose

| Compound | 3 hr. |
|---|---|
| Numbers | FOB |
| PBS | 0, 0, 0, 0 |
| 1201010 | 5, 4, 6, 6 |
| 1201095 | 6, 6, 6, 6 |
| 1201098 | 5, 6, 5, 6 |
| 1201120 | 4, 4, 6 |
| 1201124 | 6, 4, 6, 6 |
| 1201276 | 6, 6, 2 |
| 1201294 | 5, 5, 5, 4 |
| 1238259 | 3, 3, 3, 3 |
| 1238285 | 3, 3, 4, 3 |
| 1238334 | 6, 6, 6, 6 |
| 1238370 | 3, 3, 3, 3 |
| 1238371 | 3, 4 |
| 1238409 | 4, 4, 3, 4 |
| 1238440 | 3, 3, 3, 3 |
| 1238444 | 6, 5, 5, 6 |
| 1238467 | 6, 6, 6 |
| 1238497 | 4, 4, 4, 3 |
| 1238582 | 2, 3, 2, 3 |
| 1238645 | 2, 2 |
| 1238688 | 1, 1, 0, 0 |
| 1238981 | 1, 1, 0, 0 |
| 1239045 | 0, 0, 0, 0 |
| 1239792 | 3, 2, 3 |

TABLE 104
Tolerability scores in rats at 3 mg dose

| Compound | 3 hr. |
|---|---|
| Number | FOB |
| PBS | 0, 0, 0, 0 |
| 1355721 | 1, 2, 0, 1 |
| 1355745 | 3, 3, 0, 3 |
| 1355736 | 3, 0 |

TABLE 105
Tolerability scores in rats at 3 mg dose

| Compound | 3 hr. |
|---|---|
| Number | FOB |
| PBS | 0, 0, 0, 0 |
| 1373031 | 3, 3, 0, 3 |
| 1373032 | 0, 0, 0, 0 |
| 1373033 | 4, 3, 3, 4 |
| 1373034 | 1, 1, 1, 1 |
| 1373035 | 3, 3, 3, 3 |
| 1373036 | 3, 3, 2, 2 |
| 1373037 | 3, 0, 3, 2 |
| 1373038 | 1, 0, 1, 0 |
| 1373039 | 2, 2, 2, 3 |
| 1373040 | 1, 1, 1, 1 |
| 1373041 | 2, 2, 2, 2 |
| 1373042 | 0, 0, 1, 1 |
| 1373043 | 2, 3, 3, 3 |
| 1373044 | 2, 3, 2, 2 |
| 1373047 | 0, 2, 2, 0 |
| 1373049 | 1, 2, 2, 1 |
| 1373050 | 2, 2, 2, 3 |
| 1373051 | 3, 3, 3, 3 |
| 1373052 | 3, 0, 3, 3 |
| 1373054 | 0, 1, 2, 2 |
| 1373055 | 4, 2, 2, 3 |
| 1373056 | 1, 1, 0, 0 |

TABLE 106
Tolerability scores in rats at 3 mg dose

| Compound | 3 hr. |
|---|---|
| Number | FOB |
| PBS | 0, 0, 0, 0 |
| 169753 | 6, 5, 5, 6 |
| 1239235 | 0, 0, 0, 0 |
| 1270233 | 5, 5, 5, 3 |
| 1270281 | 4, 5 |
| 1270400 | 1, 2, 1, 1 |
| 1355708 | 4, 4, 4, 4 |

TABLE 107
Tolerability scores in rats at 3 mg dose

| Compound | 3 hr. |
|---|---|
| Number | FOB |
| PBS | 0, 0, 0, 0 |
| 1238994 | 1, 1, 1, 1 |
| 1373053 | 2, 2, 2, 2 |

TABLE 108
Tolerability scores in rats at 3 mg dose

| Compound | 3 hr. |
|---|---|
| Number | FOB |
| PBS | 0, 0, 0, 0 |
| 1411017 | 0, 2, 2, 2 |
| 1411018 | 1, 1, 0, 1 |
| 1406232 | 0, 0, 0, 0 |
| 1406254 | 0, 0, 0, 0 |
| 1406261 | 3, 0, 0, 3 |
| 1406262 | 0, 0, 0, 0 |
| 1270342 | 3, 3, 3, 3 |
| 1270363 | 3, 4, 4, 1 |
| 1411004 | 5, 5, 4, 4 |
| 1411005 | 3, 3, 4, 4 |
| 1411006 | 5, 5, 4, 5 |
| 1411007 | 3, 3, 3, 3 |
| 1411013 | 4, 3, 4, 4 |
| 1411014 | 4, 0, 4, 4 |
| 1411015 | 5, 5, 5, 5 |
| 1411016 | 3, 3, 3, 4 |

TABLE 109
Tolerability scores in rats at 3 mg dose

| Compound | 3 hr. |
|---|---|
| Number | FOB |
| PBS | 0, 0, 0, 0 |
| 1355720 | 4, 4, 4 |
| 1373045 | 2, 3, 2, 0 |
| 1373046 | 4, 3 |
| 1373048 | 3, 3, 0, 3 |
| 1373053 | 2, 0, 2, 2 |
| 1394131 | 3, 3, 3, 3 |
| 1394138 | 0, 0, 0, 0 |
| 1394139 | 0, 0, 0, 0 |

TABLE 110
Tolerability scores in rats at 3 mg dose

| Compound | 3 hr. |
|---|---|
| Number | FOB |
| PBS | 0, 0, 0, 0 |
| 1355706 | 4, 3, 4, 3 |
| 1406262 | 1, 1, 1, 1 |

### Example 9: Tolerability of Modified Oligonucleotides Complementary to Human PRNP in Rats, Long-Term Assessment

[0562] In separate studies run under the same conditions, modified oligonucleotides described above were tested in Sprague Dawley rats to assess the long-term tolerability of the oligonucleotides. Also tested was Comparator Compound No. 169753, described herein above and in WO2010/019270. Sprague Dawley rats each received a single intrathecal (IT) delivered dose of 3 mg of oligonucleotide or PBS. Each animal was weighed and evaluated weekly by a trained observer for adverse events. Adverse events were defined as neurological dysfunction not typical in PBS-treated control animals, including, but not limited to: abnormal limb splay, abnormal gait, tremors, abnormal respiration, paralysis, and spasticity. The onset of an adverse event is defined as the week post-dosing when the dysfunction was first recorded. Onset of adverse events typically correlates with a failure to thrive as defined by a lack of body weight gain/maintenance similar to PBS-treated animals. Animals treated with Compound No. 1238994, Compound No. 1373021, Compound No. 1373022, Compound No. 1373023, Compound No. 1373057, and Compound No. 1411016 achieved no adverse events for the duration of the study. In contrast, each animal treated with comparator Compound No. 169753 experienced one or more adverse events by five weeks post treatment.

### Example 10: Human Clinical Trial with Modified Oligonucleotides Complementary to Human PRNP

[0563] Safety, tolerability, pharmacokinetics, pharmacodynamics and efficacy of modified oligonucleotide complementary to human PRNP will be evaluated in a clinical trial setting. Patient safety will be monitored closely during the study. Safety and tolerability evaluations will include: physical examination, standard neurological assessment, vital signs, ECG, AEs and concomitant medications, CSF safety labs, plasma laboratory tests and urinalysis.

The application's sequence listing, which the Patent Office published only in electronic form, follows.

SEQUENCE LISTING (2812 sequences)

SEQ ID NO: 1 - RNA, 2808 nt, Homo sapiens
  source 1..2808: mol_type = mRNA
attttctcgatttctccattatgtaacggggagctggagctttgggccgaatttccaattaaagatgatttttacagtcaatgagccacgtcagggagcgatggcacccgcaggcggtatcaactgatgcaagtgttcaagcgaatctcaactcgttttttccggtgactcattcccggccctgcttggcagcgctgcaccctttaacttaaacctcggccggccgcccgccgggggcacagagtgtgcgccgggccgcgcggcaattggtccccgcgccgacctccgcccgcgagcgccgccgcttcccttccccgccccgcgtccctccccctcggccccgcgcgtcgcctgtcctccgagccagtcgctgacagccgcggcgccgcgagcttctcctctcctcacgaccgaggcagagcagtcattatggcgaaccttggctgctggatgctggttctctttgtggccacatggagtgacctgggcctctgcaagaagcgcccgaagcctggaggatggaacactgggggcagccgatacccggggcagggcagccctggaggcaaccgctacccacctcagggcggtggtggctgggggcagcctcatggtggtggctgggggcagcctcatggtggtggctgggggcagccccatggtggtggctggggacagcctcatggtggtggctggggtcaaggaggtggcacccacagtcagtggaacaagccgagtaagccaaaaaccaacatgaagcacatggctggtgctgcagcagctggggcagtggtggggggccttggcggctacatgctgggaagtgccatgagcaggcccatcatacatttcggcagtgactatgaggaccgttactatcgtgaaaacatgcaccgttaccccaaccaagtgtactacaggcccatggatgagtacagcaaccagaacaactttgtgcacgactgcgtcaatatcacaatcaagcagcacacggtcaccacaaccaccaagggggagaacttcaccgagaccgacgttaagatgatggagcgcgtggttgagcagatgtgtatcacccagtacgagagggaatctcaggcctattaccagagaggatcgagcatggtcctcttctcctctccacctgtgatcctcctgatctctttcctcatcttcctgatagtgggatgaggaaggtcttcctgttttcaccatctttctaatctttttccagcttgagggaggcggtatccacctgcagcccttttagtggtggtgtctcactctttcttctctctttgtcccggataggctaatcaatacccttggcactgatgggcactggaaaacatagagtagacctgagatgctggtcaagccccctttgattgagttcatcatgagccgttgctaatgccaggccagtaaaagtataacagcaaataaccattggttaatctggacttatttttggacttagtgcaacaggttgaggctaaaacaaatctcagaacagtctgaaatacctttgcctggatacctctggctccttcagcagctagagctcagtatactaatgccctatcttagtagagatttcatagctatttagagatattttccattttaagaaaacccgacaacatttctgccaggtttgttaggaggccacatgatacttattcaaaaaaatcctagagattcttagctcttgggatgcaggctcagcccgctggagcatgagctctgtgtgtaccgagaactggggtgatgttttacttttcacagtatgggctacacagcagctgttcaacaagagtaaatattgtcacaacactgaacctctggctagaggacatattcacagtgaacataactgtaacatatatgaaaggcttctgggacttgaaatcaaatgtttgggaatggtgcccttggaggcaacctcccattttagatgtttaaaggaccctatatgtggcattcctttctttaaactataggtaattaaggcagctgaaaagtaaattgccttctagacactgaaggcaaatctcctttgtccatttacctggaaaccagaatgattttgacatacaggagagctgcagttgtgaaagcaccatcatcatagaggatgatgtaattaaaaaatggtcagtgtgcaaagaaaagaactgcttgcatttctttatttctgtctcataattgtcaaaaaccagaattaggtcaagttcatagtttctgtaattggcttttgaatcaaagaatagggagacaatctaaaaaatatcttaggttggagatgacagaaatatgattgatttgaagtggaaaaagaaattctgttaatgttaattaaagtaaaattattccctgaattgtttgatattgtcacctagcagatatgtattacttttctgcaatgttattattggcttgcactttgtgagtattctatgtaaaaatatatatgtatataaaatatatattgcataggacagacttaggagttttgtttagagcagttaacatctgaagtgtctaatgcattaacttttgtaaggtactgaatacttaatatgtgggaaacccttttgcgtggtccttaggcttacaatgtgcactgaatcgtttcatgtaagaatccaaagtggacaccattaacaggtctttgaaatatgcatgtactttatattttctatatttgtaactttgcatgttcttgttttgttatataaaaaaattgtaaatgtttaatatctgactgaaattaaacgagcgaagatgagcaccaccaaaaaaaaa

SEQ ID NO: 2 - DNA, 22000 bp, Homo sapiens
  source 1..22000: mol_type = genomic DNA
catgtcgcatcattccccttcttaaatcttcaagggcttcctatcatatttaattattaaaacccaaacatctgtcatgggctgtcaggccctatggtcactgtctgtatggcttcctgtatcctctttgaggtctgaagtcagagactgtaactatttaattcacactaagtgctcaataaagtggaggaaataattctccttttgtgagaagatgaatttagagtctaacttctttagtttctccttacttgctgaggaggatctatatgatgtggtcaaatcactttcagccaggacacaggagatgggaagggagacttccaaagaatgacttgatgatgctgtgaacctcagcacaatagggctctgtgggcaaacacagtagggtttgacctccaaggacaaaccctacaccccactccccacccagtccggaaaacgactttcactgtttatagtgagatatgggtggttgtggtcatgggagaggcaatgggagtgagtttggaatgaggaattatgcagggccatttgaatagccacttcctgtgggttgcccacccttggagtggttcataaggtcaataaaaacctctaagaatccataggccagaccatcaaccccattgtggcagcttttaaaactggcaacaaggtctttgatactcttcccattgaggagtgggctccatgtcctctgtccttgaatctgggggctatatgactttttttttttcttttctgagacagagtctcgctctgtcgcccaggctgaagtgcaatggtgccatcttggctcactgcaacctctgcctcccgggttcaagcgattctcctgcctcaccctcctgagtagctgagattacaggtgcgcatcaccatgcctggctaatttttgtatttttaatggagacggggtttcaccatgttgcccaggctggtcttgaactcctgacctcaagtaatccatgggcctcggcctcccaaagtgctgggattacaggcatgagccaccgcgcccggcaatggggctatataactgttacgtcaacagcatacagtggaagtgatgctacctgactactgagcccaggcaggaagtggcattgcagcttcttgtttgctgaaactctcacacttggagtcctgagccaacatgtaagaagttcatccaagccgagaccaccagaccatgaggaaaccaggccacacagagaagccgcagctaggcaccgcaatcagcacatctgatcttcaagtcctcctagcccaggtgccactcaggcaagtgcataggcttcagatgactgcaacccccggctatcaaggtacccctagacttagagtcttctcaactgacaccccaaacataatggggcagaatcaagtccccgctgtgcctgtccagctccctggcttaaacaatccattggcataataaaatggtagttgttttaaaccacctaagttgtggggtatttgcagcacatcagtaataaccagaataggtcataagtcaatcccctttggttccctagttctttccctccaagaaatcccaggccatttgagccctttcctgatgggaggaaagcagtcgaccagaaaatacaattcttttgaggaaaagatgggttttagcgtcttggaaccaagcttcacagagcgccttctgccagtgggcagccagccccttgcctaggctgatctggtcacctacttccagccccaccccagctctgtcctcccacccagctctgtcctccctgcaggccctgagcctctaggagactcaaagagacactgtgctgcccgctgaattcatctcccagtgagccatctctgaggaaaggaggtaaggctctgaatgcgatgtcaacctaagcattacataacactgataggttgtaaaatggcctcgctgcctagtgctcattctaactggccacaatccagtcctccctgttgcactgagtcagctccctccaaaggcggcgctttccaggcctcctggttgccctttcccagcagacctttcaagtgctcacccacactcacataaacatggcccaggcactgtttacagcagctctcctctgtgcattctcctggcttctcctgtctctcgccatttgtacccctcccctgcaacttgagtgacagtgattggtcctgagatgcaaatatttgatgcacatatgtttacaatgcagcctcagcttttttttttttttttgtaaagagacaaagagtgagacagggtcttggcctatagccctgtggcccaggctggagtgcagtggcacaattaaagctcactgcagcctctacctcctgggctcaagcaatcctcccatctcagcctccccagtagctgggactacaggactgtgccaccgttcccagcaattttttttattttttgtagaaatggggtctcactatgttgctcactctggtctcaaactcctgagctcaagcaatcttcctgccttggcctctgaaagtgctgggattacaggcctgagccactgcacctggctgtcaacattcttaaatctctttccttacatgcttcctaaacctctcacccaaaactaggagactagatgtcctattttccccagggcatgcctggtttacgcccatttcactttaaaagtgcccaatttgggtaataatttataagatccccctccctctaaatcctgtccttctatcacttcatccttcgctctcctttaaaatgagacagttgtcagcaggaatcctgcgcaagaacacaccaccctgtttcatagaagatatctcaggtaatgtgcaaacacgggtttttaaacggagcgcatttttctcatttgttaatatcaccacctaaatcatctcttgcctaaaacaaggagtagaaagtgaatgaaggaaggaacaggtgatggtcagtgtcctttctacgcctcaaaatttaagagtttatgtgaaaattcataaatattaatctcaatccaggttaagcaaaattttttgctctcctctttagaaatttctggttgccaaagttccagaaattgcttcctcattcctgagcctttcattttctcgatttctccattatgtaacggggagctggagctttgggccgaatttccaattaaagatgatttttacagtcaatgagccacgtcagggagcgatggcacccgcaggcggtatcaactgatgcaagtgttcaagcgaatctcaactcgttttttccggtgactcattcccggccctgcttggcagcgctgcaccctttaacttaaacctcggccggccgcccgccgggggcacagagtgtgcgccgggccgcgcggcaattggtccccgcgccgacctccgcccgcgagcgccgccgcttcccttccccgccccgcgtccctccccctcggccccgcgcgtcgcctgtcctccgagccagtcgctgacagccgcggcgccgcgagcttctcctctcctcacgaccgaggcaggtaaacgcccggggtgggaggaacgcgggcgggggcaggggagccgcgggggccgagtgaggaccccgggcctcgggtcccaggcgcaagggtgcccggccgggcggggtcgggaccccagtgaggaggggccgggggctgccccgcgggcgcgtgacgcgtctcgggcctgcccggctgcgctggtctccgctcgggtgaggcggcttggcttcgcttttcaggttaggaaagctccctttactgcgcgttggggggctgggggagctggcggagccccgttagggaggtcggtggcgccggggtgtctcagcgccccctgcaccccgcgcgggtccggcccagcgggcgatcgctggcgcccagggaactccgggagggccgccagcgggctccgcagggcgcggggcggggaggggcgcctgggggccgcggggctcgcgctccccgcccgttggccgcccctcggaggccgagatcggggcccagaacgccccttggcaaggcctggcgcttccgcgatgcccagagggtgcttggggggatggagagaggggcgcccgccgggggagttccgggagcctcggtgcctcccgccgcagctgcagcgttcctcccgggaggcggcccagcccttcatcctcgccgcctgagcttctccgaggggggctgcagccttgcggccgttgccaccgcctggagaagcggcccacgcggactgacgggcgggggcggggcctcgggcctcggcgggggcggggtccggggaggccccaccctctgttctccaggggcggggagagaggagctgcaggtctgcggcctggccccaggtgcgatggcggaccccagcttggccagtcacattcctcccagtccccctggagggagaacgctggccatggggggctccaaggaacaaccagcctcggatgacgacccttgggtcaccggtctccccacctgtgcggcaggcgccttcacgtttcattattaaacaatggggagaaatccatgtttactgtcctttttaaggaattttttgctcttctctttgaggtggctgtaggaaatagattttttttttaacctcgcaattccaccacggtcacatccatcctcgccatcgcagagccacagctctccgtttttgtttcctagcctccagattctcacacaacacagtgcagtttcactgctgtaatgatgaggatcttcatggccgcgttattttcttgttctgagagcatcacggtttaattagcagttccccatatgatttgaagtgtttcccgtttccttagggaaaactcctggtagaataggattaaggatttttacaaatataattatcaaaaacataggaacagggaattggataaatatgttaaacttctggaaaaatcaacaacgctcttagatttgtagaagaaaggaaaaaatcaccagtggaaaggagcaattttacttacacaaacacagagaaggtcttacagtgaaaaaaagctaaccagtaaggggaaaagcaggcagaggggtaggatgtgatttgtatgttatttatatctaacacaagtcttccacaccgaaaggaaaatattaagattataatagataaatggcaaaatgatgagtcatttacacaataaaatgcaaattagagcatgtttgggttatcattttacatctattaaaataaccaaaataattaatagtaacagcaacccttgctggaaggttgcccaaaacttggcattttcaagtgtctggggaggtggcagggctttggggtcacaaagatggttctgcagtcaattttgtgaccttggacaggctacctaatttcctgatcctccttttgtccattcatagaatggaggaaatgatagctactttctgcgtctgtatgtatgagttattgggggcatttcgaaccagtgacaaacattttgttaagcaatctggtgatgcattaagaagctggaagctgtgacccagaaaccccactcctgagaacttacctgcaatggaagaaacaaacaaacaaaaacaggcatgtattcctagcagaatgatctaaaattagaacacctggaaaagagcctaaatgtataacaccagggcagtagctaagaaaattatgacacattaactgaaatgaacattatgtaaccactaaaaatcatgattttggagcctgtgatatgtggggaaaaactgacaagtaaaaaagtgggttattaactgcacctgcttactctaacgtgaacgcatatgtgaaaaatctgaaaggaaaagcacagaaaatggacgttttcattgaaattgtcggtgatcttaattttcctttggtgaatatattgctctcactaagggcgtttaaaaaatagttcacaggttttaattttttagatgaaatggacccacagttttctgtaagagaaaggagagattgttatatttgctacttagaataaaagatttttagccaacgttgtttcctttttcaaatatttttccatttttttagttgattaatgatttagtaatttgtgtattgggtttttttaagaatcagttcttagattcatttatcaattctagttttttgttgttgtttttaaggactcctgaatatttttcaaaactgaacaatttcagccatgtctgagctttccgtcttcctggaggcacaaatctagtttagctgaaccacaacagattgtacatatcctgcagaacctctgtggtcttaggaaggttgaaagtcaccaaatgtcacagaaaatgagggtcaggaaaggctgtgatcacaagctcttgatccagaggccactcgggtgcatctgtgtgactgacacctcattgcatcatcatttcttgtaaaatcagcttaattttgcagagaaatggccacagatttttagaattatgctgaattatgtaagggagcagccattttaaaaataatgtaatcaaataacaataataacataacagaagtttctgcaccacactgacactgaacatggctgtcaaccaactagccaaaccaaggtgaaagattctctgaacttcagttttaacttacttcgtccattctcccttttcagatcttatttcttcttccaaggcaactatatccactgtgaactgctgcatattaaacattcaaaacatgtctgtatctaacccagtgatggctacagcattataaaataactcctaagtgaatagtgtgtgcagcaattctcacagctaggagaattttttttgtcgatgtgttaaccattcctttttctccaactgcattctacttaaactgttacagtattgtgtgatcactttaagggaggtaatccttcagtgaaaagcattataaatgttgaagattagacccctgaggacctagcactgaagcctgatcacgggtgccaattccctgagaagcttttatagattcccaaatcccatcgctaggcactctctgactggcttgtgatgggttccagcaatgttgttttttaaaagctcctcaggtaattctgatcatggaccaggttggggaccctttgctctgttcagtttgtggtttctaggtgccagtgagaaacccctacccccaatttttgtgcaaaatttttttcagcttacatcaagttctttatgaacctcagaaaattaaaatataacaagggaatttacttagctcagaagagacaagggacattatggggtgaaggtcgggggttgtttgacatttgccccttcccgatgtaactaattaagcttcaagttgtaatgtgttttatgggctagaaggctttagtgcctatatttggatctcagctccaacaccttggactcttacaaccttgggataagttcttactagctctgactctcactccccatctataaatgggaataagatgaacggggtaatttatagattttttagtaccctctctctagttccgctgttttgccattctgctcatgcaccaatgccatgtgatcttattgtagctttgcactctgacacctggcaggtcaagtgcacccttgattatcttctcattaaaaattttcttcagtcttttaagttttgagtataatttcataatgtcttttaaaatctcttttgaattctttttcaaatttatttattttttctttgacagataagattatatgtattgtgtacaaaattagaaagagatcttttcctctaagatctgaaacaagacaagaatgctcacacgcactagttctattcaacatatggtactgcaagtcctagccaggacagttagacaagagaaagaaataaaaagcatccaaatttgaaaggaaaaagttaaattgttcctatttggagacgacatgattttacacttataaaaccctaaagactccaccagaaaaccattagaactaataaattcagtaaagttgcaggatacaaaattaacatacaaaaatcagtagtgtttctatatgccaacagtgaactatcaggaaagaaataaaaagaaagtgccatttacaatagctacaaaataaatatttcagaataaatttagccaagaaggtgaaagatctctacactgaaaactataaaacactgatgaaagaaattcaaggagacacaaatagaaagatagcctgtgctcatggggggataattaatgttgttaaaatgtccatactacccaaagtgacctacagattccatagaatccctatcaaaataccaatgacattcttcacagaaatagaaaaaacaatcctaaaattgggtgaaggtggcatctttgtctcgtttcagatctaagaggaaaagctctcaatttttcaccattaagtatgatgttagctgtgaccttgtcatatgtggcctttattgtgttgaggtacaatgcttctacacctaattcattgagagtttttatcatgaaagaatgttgaattttgtcaaacgctttttctgcatctattgaaatgatcgtatggttattgtctcactctgttactgtgatgtatcacacttattgatttgtgtatgttgaaccatccttgcagccctgggatgaatcccactgtatcatagtaaatgatctttttaatgagctgttgaatttgcttcgctagaattttgttaagaatttttgcacctatgttcatcagggatattggcctatactgccattttcttgtgtgtttttgtgggactttgacatcaggataatgctggtttctcctgttattaatttctagttttataccatcatgcttagaaaaaaaacttgatacgatttcagtctaattaagtttgttaagacttgttttatggcctaacatatgatctgtcttggagcatgctccatgtgctgttgagaagaatgtgtattctgcagctgttggatggaatgtcctgtatttgtctgtttggatccatttggtctaagtgaagtgtaagtctgatgcctccttatttattttctttctaaatctcccgtccaaaaatctaagagatccaaagcaaacagggggttataaaattacctttgaattctgactgaaattgtgtttactttgtagattatttgctggtgacttggtatctttcaatattggtttcccaaacaaaaaacattgtatgtctttctctttttccagtcttcttttatgtctcagtaaaattttgtagcttgcctactacttattttcaggttaaatcctagatattttcaattcttactgccattatgaatgaatgtttttccccatgaaatgtttaactacagctgatttagggactcactgagttttgatttgttgatttgaaaaactaccaccctgttgagctcatgtatttattctaagacattttttgagattttccaggtaaaaaaattatacctagatgaatttatagaacaacctaatagcataaaagcaatagattattgttcaccacattaatgggaatgcctttcctcttaaaattatgatatcttgggctttgtgtttgtgacagcatttctttatgatggaaagagactatccttccagttctatagaaacgttttaaaaatagcttacatttttaaaaatttaggaatgatattgattttcattgaaaacttttcaacatctgaagaaaatcttttcttcctaacctattaatagagctcctgattttcaaccattcttgtattcctaaaataatccatattggtcataatgtattcttcttttactaaactgttaaaataagttgggtgctgtttttttagattttggcacctgtgtgagaggagggtgccatggcagggtggctaagtgtgcccacctgtgtactagcattgaattttgaccctttatcccattggctctaaacactacatctcaggtgaagacgcccaaatgtttatctctactgagttacagattcctataacaattgcttaaattgatactcccacttgaatgtctcataggtgtggcaaagtttacatgtctatactgaaactcttggttttctctcccaggcatgaccctccaccagtttgtcctatttcagtagatggcatcaccgccatctccctggttatggaagtcccagacccgggcaactctcactcctccatccactcaaccagcaggtcttattggctctttctgtaaaatatgtctcatttattcacagcctgctagctgcatggactccatcccaggccacgccaccatcttcctgcagcagtttcttaactggcctctccattccctttcttgtcccactaaattttcttctatttaagaaaaaatgttttgtagacatggggtttcaccatgttgcccaggctggtctcaaactcctgggctcaagcaatcctcctgcctgagcttcccaaagtgctgggattataggcttgagctgagcttttgaaaaaacattctatgatgttactgtcctactaagaccctttaatggctccccactgctttcagaggaaaatagaaatttctctctgtggaccatgaggccctcatgatctgaccctcaccacctccctagtcttagcagtccacctgccactgtctcatggggctccacagatttgatctcctttttggtccttaagcccaccaagctaagtatcttattcaaaactgtgtcctcagcccctagcacaattcttgacccttagaattctgacacttgaaatgtgtgttaagctaatcaataaattattgtgccaggcttggtggcacaataatgtgttgtgggtcacctatatatagctgtggctcacacctataatcccagcactttgggaggctgaggcctgcagattggttgagcccaggaatttgagaccagcctgggcaacatggcaagaccccatcactattaaaaatacaaaaaaaaaaaaaaccaggcgtggtgttgcatacctgtggtcccagctactcaggaggatcacttgagcccactgggtggaggttgcagagagctgagatcatgccactacactttggcctgggtaagaccctgtctcaagaaaaaaaaaaaaaggttatggtactgtaaatattatattacagtgtataatttttgacagctttttttctccatttcttctatggttattggtcagttctagccttctatttttttttttaagctgacacatactggctgggcatggtggctcacacctgtaatctcagcactttgggaggccaagacaggaagatctcttgagcccagaagtttgaggcgagcctgggcaacatagcaagaccccatctctaccagaaaagaaacaacaacaaaaagaaactggcacatactagttattccataaatatttcttaaatgaattaattctaaagttgatttttataatttacatcttaatagaaagacaatccatctcagagatatttttattcattaaggaaagttgcataaagtaatttattaaccttttaaagcattctctaagcctatttccccttatagagatatgttttctagtgatgtgtgtatgttacattttcaaataactcttaattttatttagaaattccacatttttgtgggttttatttattaaattcgattttcatctctattattaatttatgacagtttattttgaagttttctgttttcttccttttgagttgaataatcatttactttattttacttcttctattcagttgtattatccatgttcctctgatagccatgcaggttccaaatcctcacatttttcaacttctttaaaagattttttttgtgctatcctgataagcgttaagtgttatatcattttttttcatttttattatattcttaatgattttgattctctttttctatccttttggttttctttcttaggtaaatgatcagttatatcttttggccatttttttctgttggaattactgtctcttactgctctgtaagaattccttgcaagttctagaaatgaatcctctgttgattttaagtactaaagtcccctttaccattgtgtactctttctattaactttgtccagagtcagctttatcgtgctgaacaagaatctttacattttaatttttttttttaatttttaagttcaagggtacaagtgcaggtttgttccataggtaaactcgtgtcatgggggtttgtcatacagattatttcatcactcaggtactaagcctagtacccattagttatttttcctgatcctctccctcccttagccctccgataggccctagtatgtgttgttcctctgcatgcgtccatgtgttcttatcatttaggtcccacttataaatgagaacatgtagaattgggttttctgttcctgtgtcagtttgcatatccctgcaaagaacatgatctcgttcttttctggggctgcatagtattcgatagcatatatgtaccacactttcattatcccagctatcactgatgggcatttaggttgattccatgtctttgctattgtggatagttttgcaatgaacatacacgtgcatgtgtctttgtaataggatgatttatattcctttgggtatatacctagtaatgggattgctgagtcgaatgatatttccgtctttaggtttttgaggatgtaatcaaattcatcaattatttgccttatggtttgtgctttttgtttaaaaagttcttcccccattcctcctccaggtcacaaagacatttcccaatattttcctcttctagcgccaaacttgtacctttcacatgtaagtcttggatccatctagagttcacttttgtatgtagttagggatctagttttctttttcttgtttcccagaagcatgaaaccttcctcctttattggttcgtggtgcccatgtcagcacacatcaagtccctgttaaagtgtatctacgtgggtttctctctcaacttgcttttctgtttcctttggtctctccgtctattcctgagctttaccgtccagtcttcgtcactgtggttttgtagtgatttcatgtctgctttggcagattccctcctctttacactttttttttaaggttgaccttattattcatggacattttcttccccatagaagtttactgaacttctcaaaaaattgagattacctggaattttaactggcattttattgcaactaccagttcatttaggataatggacatctttataatactgagttatcgccatcaagaccatggaatgcctctccatttttttcagaccatcttctgtgttctctgtataatgtgtcacccatcagaagtcttttcttagttaagtcaattcctagacgctttacagtttggttgttactttgaatatctgtattttcttctggtcagttattgctactgtagaggaatgccgttggttttcgtaggctgaccttcagtcccacaaccttgcactctagcgttggttctcatgttatccctgttattctgttggattttctatgtgcatgatcacactaattgcaaatagtgtcagctagagcactttccttgccattcttacacctgttacttctttgcatatggccttggacagcaccttgagtcccatgacaatggatgtccctgttgtatttctgagtgtattcttagcattcttcttagtaataaacaggtattgaccattaccatatacttaataggatatcttgaaatatgccagaggactaggccactacttgactggtgacagagagtatcttagatgtataggcccccagacatgccagtgtcctctctcaccacccatctccactccaaagttgtctggcctcacccaccttctgtgcctggttcttctcctctgtgcttctctcactatgccatgtcctcgcctgttcaggtgtctctaagagctcatagatccttaactcttacagctttaaatgaggcacattcaaagcccgactcagtgtcattccctgcagtctcctcttcctcccatcttacccatttcaggtaatatctccagccagccagagtctactgcagtagctggcacatgaaataaatgtttatttaactgaattgaaaatgttagctggccattgtcaaaaatactattttgtaaatttataaatatggttctctttgtatatccattataaatatttagtatttagtttgattattccttatgctttataacatgtgttttcccattcattcatttatccagcatttattttgcatgtctatgggtcaagcgctctgtctaggaacactgctgtgaacaaaaccaaactcccgccctaaaggagcctgcactcccgtggagaacatgaataataagcacagaggaaataacataatatctcaagtagctgtaactgctccagagaataatgaagccaggaaagggggtgggctagggggtgctgttttaggtagagtgatgggaacagccccactgagcaaactttagccacatgagtagctggaagaaaagccttctaggaccagggaacagcaagtgcaacagccctgagacaggatgggcttgtcagtttgaggagcagtgggaggcctgaaccaggttacatggggcccagccagtatggccacgactttgtgttttatccagagtacaaaggagcctcactgagggacaagggaagtggcatgatgtgacccgcatattaagaggagagcgctcaatggcagccaggggaggagcagggaggctggttgggaggctgttgaagaaatcaggtgagaagtgatggaagcaccgaataagatggtcatgttggaaaaattgagaagctgaggtgcttagcattgattttcaaggtagagctactgagatttgctgatagatccaatgtatgctgggagagaaaattcagtcactctagagcattggctggatttgtcacccattgcagcgaatggagaaggtgctgacataaaagccctttagactgaaagctactgactgaggggatggtgccctagtttgatttcctggggtgtatgagtagcagggaggccaagagctgggcctcacgagattgtggggactacatcagggaagcaggcctgcaaagaacctgcaccacagacccccacctaaaagagcctccaaaaaccctaactggcatgacctgagtactttaactctgcttgtaactttcaaatatattttgatttgcttatgaccaccaaggcaaaacttcccatttcaataatgttagtagaaacataaacaggatgttaatttatttatttggtaattctttttatgaatattatccagtttaatcattagctctgaaggagatgaaaaataattttctaatttttagaaaaatttgcagctaattgggtgataaaggtaaggggtttctgagttcacaaaaatgttctaaaattggcaacagtttcggttgcacgtttcattaaatgtactaaaaaccattgaactgtacatggtatatggtgaattatatggtatgtgaattatatctcaacaagctgggtattgtttttttaaaaaataaaaataaaaaaggagaaagagagagagaaaaacaattgcagatcatcccagcactgaggacaagactaacttcagtgttccagtatatgccattataggttttacggcacacagtgatgatttggagcctatgatttgacctagggtacagcaggtactgtttagcaatcattttactattgtcataggtctctgctcttggagctaagtgcccagggtaaatgagatctttaatttgaaaagagatttttgatttgatgaatgtacattctccaaagggtcataaattgtcattctggatgtttgatctgtttgttgttttggtacaaaaattagaagaaaataattcactcataaaatgttaaataatgaactaaaagtcattcatcaagtccataacttagggtcacatttgtccttggagcaggagaaagagttgtgttcacccttttcttacttttgcttttgtcctaagtgcttcagagaagtacagggtggcaacagtgtttctactgagcagctgataccattgctatgcactcattcattatgcaggaaacatttagtaatttcaacataaatatgggactctgacgttctcctcttcattttgcagagcagtcattatggcgaaccttggctgctggatgctggttctctttgtggccacatggagtgacctgggcctctgcaagaagcgcccgaagcctggaggatggaacactgggggcagccgatacccggggcagggcagccctggaggcaaccgctacccacctcagggcggtggtggctgggggcagcctcatggtggtggctgggggcagcctcatggtggtggctgggggcagccccatggtggtggctggggacagcctcatggtggtggctggggtcaaggaggtggcacccacagtcagtggaacaagccgagtaagccaaaaaccaacatgaagcacatggctggtgctgcagcagctggggcagtggtggggggccttggcggctacatgctgggaagtgccatgagcaggcccatcatacatttcggcagtgactatgaggaccgttactatcgtgaaaacatgcaccgttaccccaaccaagtgtactacaggcccatggatgagtacagcaaccagaacaactttgtgcacgactgcgtcaatatcacaatcaagcagcacacggtcaccacaaccaccaagggggagaacttcaccgagaccgacgttaagatgatggagcgcgtggttgagcagatgtgtatcacccagtacgagagggaatctcaggcctattaccagagaggatcgagcatggtcctcttctcctctccacctgtgatcctcctgatctctttcctcatcttcctgatagtgggatgaggaaggtcttcctgttttcaccatctttctaatctttttccagcttgagggaggcggtatccacctgcagcccttttagtggtggtgtctcactctttcttctctctttgtcccggataggctaatcaatacccttggcactgatgggcactggaaaacatagagtagacctgagatgctggtcaagccccctttgattgagttcatcatgagccgttgctaatgccaggccagtaaaagtataacagcaaataaccattggttaatctggacttatttttggacttagtgcaacaggttgaggctaaaacaaatctcagaacagtctgaaatacctttgcctggatacctctggctccttcagcagctagagctcagtatactaatgccctatcttagtagagatttcatagctatttagagatattttccattttaagaaaacccgacaacatttctgccaggtttgttaggaggccacatgatacttattcaaaaaaatcctagagattcttagctcttgggatgcaggctcagcccgctggagcatgagctctgtgtgtaccgagaactggggtgatgttttacttttcacagtatgggctacacagcagctgttcaacaagagtaaatattgtcacaacactgaacctctggctagaggacatattcacagtgaacataactgtaacatatatgaaaggcttctgggacttgaaatcaaatgtttgggaatggtgcccttggaggcaacctcccattttagatgtttaaaggaccctatatgtggcattcctttctttaaactataggtaattaaggcagctgaaaagtaaattgccttctagacactgaaggcaaatctcctttgtccatttacctggaaaccagaatgattttgacatacaggagagctgcagttgtgaaagcaccatcatcatagaggatgatgtaattaaaaaatggtcagtgtgcaaagaaaagaactgcttgcatttctttatttctgtctcataattgtcaaaaaccagaattaggtcaagttcatagtttctgtaattggcttttgaatcaaagaatagggagacaatctaaaaaatatcttaggttggagatgacagaaatatgattgatttgaagtggaaaaagaaattctgttaatgttaattaaagtaaaattattccctgaattgtttgatattgtcacctagcagatatgtattacttttctgcaatgttattattggcttgcactttgtgagtattctatgtaaaaatatatatgtatataaaatatatattgcataggacagacttaggagttttgtttagagcagttaacatctgaagtgtctaatgcattaacttttgtaaggtactgaatacttaatatgtgggaaacccttttgcgtggtccttaggcttacaatgtgcactgaatcgtttcatgtaagaatccaaagtggacaccattaacaggtctttgaaatatgcatgtactttatattttctatatttgtaactttgcatgttcttgttttgttatataaaaaaattgtaaatgtttaatatctgactgaaattaaacgagcgaagatgagcaccacctcccgtgtctgcagttgtatttcctggtgcttgccctgtgttggggactgttttgggggttaatctgagccaagtggcgctttctgtcctcccttctcaagtgatggccgatggttcacgcacttccccctgttcctgcccttgtcctcacttcccagtcacccactagttcatctctgcggcttttgcattttctccacaagcatctaagtgggcttagcactggtaaactgcaaaggcactattgcagcaggaggaacagtctgggagcttttttcagtcctggatttagaaatagattttcttgattaaaatgaaaattaacaagctctaaagaactgttgacccttgaactacacagggattagaggcactgacctgccgcacagtcgaaaatctgcagagaagttttttttgttttgttttgttttttttgagacggagtctcgctctgtcgcccaggctggagtgcagtggcgggatctcggctcactgcaacctccgcctcccgggttcaggcgattctcctgcctcagcctcctgagtagctgggactacaggcatatgccaccatgcccggctaatttttgtatttttagtagagatggagtttcaccatattggccaggctgttctcaaactcggcctcaagtgatctgctcgcctcagccacccaaagtgctaggattacaagcatgagccaccgcgcccggcctgcatagaacttttaactcccccaaaacttaattgctaatagattaattgcctgctgttggctggaagccttaccaataacgtaaacagttggttagcacatatttcacatgtcatatatactatatactgtattcttaccataaagtaagttagagaaaatgttgttaaaacaatgaggaaggaaaagtatatttactattcactgactggaagtggatcatcataaagatcttcatctcatcttcctcacattgaggaaggctgaggaggaaggggaggggttggtcttgctgtctcctgggtggcagaggcagaagaaaatctgtgtctcgtggactcagttccaacccgtggtgttcaagggtcacctgtgcctgctttatgcaccccaaatcaggctctaaaatagtctcaggtcctgtgagccttagtgacacactcttctcagattcaatacctttgatctgaaaggtgactttgatttgtcataatcttccaactcattctctacatgtttcgacgcaccagcactgtgatgttcttggttatccttggcagaagttttctcctgcaactaatttgctaaaggcagggggtaatcagaagtgacagtggttgaaatcacaggccaatatcttagcaaacgtctgtgttgtaaatggggaagtgcctctggtggggtcttcaaggatcactccagcctggctagggaaactctaggggagaggcacttgaaattattgtactcataggtcctagagagggaggcatgtcatgccaagcagggggctggattggaggcgtgcccagggattgggtgcaactcagcgtgtatgagacagaaagagagagaactcctgggcaagtgcctttactgggagccaggatggaggacacaagcacaaggtgtaaggggatctcactggtgtgtttgaatgtcactaagtcacagtcaggggaagacaagaagtggaacttgtggcagggaccagccttattacactggcacctggttacctggacagggtgcccactgcctatttgtaggatgtcaaggtatcaggaaaatatgaagtttttaaaaatttacaatataatgccaacctcctacggtgatcagaggatcagctttgtattaaagatggaaagataccaatcatcacccacaaaactactaaaacagaaagaatgacaaatacaattctcggccaggcacagttgctcacgcctgtaatccctgcactttgggaggccgaggcaggcagatcacttgaggtcaggagttcaagaccagcctggccaacatggtgaaacccccattccctactaaaattacaaaaaattagctgggtgtggtcgcacgtgcctgtaatcccagctactcaggaggctgaggcaggagaatcgcttataaccgggaggcagaggctgcagtgagccgagatcccgccattgcactccagcctggcggtaagagcgaaactccgtctcaaaaaaataaaataaaataaacttttcattacctgcctataataatttctcaaaaagagtcaactgaggagacttaaagtgttcgaagcatagctacttgtaggaccagagtgaataatatccacctgtatctttcccaggcctcatgtttcctttgttatttcaaacgtgtgagtcatgcaaaaggaatttttactaaaaaggaaaagaaaaaaatttaaaatgaccagcataaacataattgagttcaatcccccagaaagggttattcggagaacagccaggcgctgcccttgtttttccccctccccatctggggctaagaccaaaaggggtctgtctttggagggaaatctgggtctgtacagcttcccactctaaggggagccttaatcccagccggaacctgagcttctccaggcaaggcctgaccttgccgactgatctaagcattctgcgcttcattttcaccccagaaaggtgacttcctcctggctggggggctcctcccctaggactcagctcatcctgaactaataaccgcgttatgtccatcctttgttccgttctttgagtcccacccatgttcttcaggaaagctgcagctggtccacgtgccttgcctgtgcttctgtagaactacccctcccttctctgcctgcagcagggctcctggaacttgaatgtgcacttgaatctgcaggtcctgactgtaggtctgtgtttctaacatgctgctgggtgacgctgtgcccgtcctgtggtcggcattgtaacaaggctccgcgggttcccacgccggagtctgcgtcagaaacctctggagggcttgttatacacagatggctgaaccccatccccagagtttctgattccctagtaccagggtggggtctgagaatttgcatttctaacaaattcccaggtgatactgatgctgctggtgcggagaggtcacatggaaaccactgctcggcagatgcaaaagaagcagaagccgccccaaccctgaaatactcacaaagctgctgtggagaccagacacctgccgggggaatgagagcctggggatcctgcctgggaggaagagagagctgggagctctatgggtgaatgccaatggaggtgcaaggaggtgactaactcctgccgtctgaaaatagtgaagcacagccgaggcctgaagcccacccttagtgaga

SEQ ID NO: 3 - RNA, 2620 nt, Homo sapiens
  source 1..2620: mol_type = mRNA
gaggcaggtaaacgcccggggtgggaggaacgcgggcgggggcaggggagccgcgggggccgagtgaggaccccgggcctcgggtcccaggcgcaagggtgcccggccgggcggggtcgggaccccagtgaggaggggccgggggctgccccgcgggcgcgtgacgcgtctcgggcctgcccggctgcgctggtctccgctcgggtgaggcggcttggcttcgcttttcagagcagtcattatggcgaaccttggctgctggatgctggttctctttgtggccacatggagtgacctgggcctctgcaagaagcgcccgaagcctggaggatggaacactgggggcagccgatacccggggcagggcagccctggaggcaaccgctacccacctcagggcggtggtggctgggggcagcctcatggtggtggctgggggcagcctcatggtggtggctgggggcagccccatggtggtggctggggacagcctcatggtggtggctggggtcaaggaggtggcacccacagtcagtggaacaagccgagtaagccaaaaaccaacatgaagcacatggctggtgctgcagcagctggggcagtggtggggggccttggcggctacatgctgggaagtgccatgagcaggcccatcatacatttcggcagtgactatgaggaccgttactatcgtgaaaacatgcaccgttaccccaaccaagtgtactacaggcccatggatgagtacagcaaccagaacaactttgtgcacgactgcgtcaatatcacaatcaagcagcacacggtcaccacaaccaccaagggggagaacttcaccgagaccgacgttaagatgatggagcgcgtggttgagcagatgtgtatcacccagtacgagagggaatctcaggcctattaccagagaggatcgagcatggtcctcttctcctctccacctgtgatcctcctgatctctttcctcatcttcctgatagtgggatgaggaaggtcttcctgttttcaccatctttctaatctttttccagcttgagggaggcggtatccacctgcagcccttttagtggtggtgtctcactctttcttctctctttgtcccggataggctaatcaatacccttggcactgatgggcactggaaaacatagagtagacctgagatgctggtcaagccccctttgattgagttcatcatgagccgttgctaatgccaggccagtaaaagtataacagcaaataaccattggttaatctggacttatttttggacttagtgcaacaggttgaggctaaaacaaatctcagaacagtctgaaatacctttgcctggatacctctggctccttcagcagctagagctcagtatactaatgccctatcttagtagagatttcatagctatttagagatattttccattttaagaaaacccgacaacatttctgccaggtttgttaggaggccacatgatacttattcaaaaaaatcctagagattcttagctcttgggatgcaggctcagcccgctggagcatgagctctgtgtgtaccgagaactggggtgatgttttacttttcacagtatgggctacacagcagctgttcaacaagagtaaatattgtcacaacactgaacctctggctagaggacatattcacagtgaacataactgtaacatatatgaaaggcttctgggacttgaaatcaaatgtttgggaatggtgcccttggaggcaacctcccattttagatgtttaaaggaccctatatgtggcattcctttctttaaactataggtaattaaggcagctgaaaagtaaattgccttctagacactgaaggcaaatctcctttgtccatttacctggaaaccagaatgattttgacatacaggagagctgcagttgtgaaagcaccatcatcatagaggatgatgtaattaaaaaatggtcagtgtgcaaagaaaagaactgcttgcatttctttatttctgtctcataattgtcaaaaaccagaattaggtcaagttcatagtttctgtaattggcttttgaatcaaagaatagggagacaatctaaaaaatatcttaggttggagatgacagaaatatgattgatttgaagtggaaaaagaaattctgttaatgttaattaaagtaaaattattccctgaattgtttgatattgtcacctagcagatatgtattacttttctgcaatgttattattggcttgcactttgtgagtattctatgtaaaaatatatatgtatataaaatatatattgcataggacagacttaggagttttgtttagagcagttaacatctgaagtgtctaatgcattaacttttgtaaggtactgaatacttaatatgtgggaaacccttttgcgtggtccttaggcttacaatgtgcactgaatcgtttcatgtaagaatccaaagtggacaccattaacaggtctttgaaatatgcatgtactttatattttctatatttgtaactttgcatgttcttgttttgttatataaaaaaattgtaaatgtttaatatctgactgaaattaaacgagcgaagatgagcaccaccaaaaaaaaa

SEQ ID NO: 4 - RNA, 806 nt, Homo sapiens
  source 1..806: mol_type = mRNA
agtcgctgacagccgcggcgccgcgagcttctcctctcctcacgaccgaggcagtcattatggcgaaccttggctgctggatgctggttctctttgtggccacatggagtgacctgggcctctgcaagaagcgcccgaagcctggaggatggaacactgggggcagccgatacccggggcagggcagccctggaggcaaccgctacccacctcagggcggtggtggctgggggcagcctcatggtggtggctgggggcagcctcatggtggtggctgggggcagccccatggtggtggctggggacagcctcatggtggtggctggggtcaaggaggtggcacccacagtcagtggaacaagccgagtaagccaaaaaccaacatgaagcacatggctggtgctgcagcagctggggcagtggtggggggccttggcggctacatgctgggaagtgccatgagcaggcccatcatacatttcggcagtgactatgaggaccgttactatcgtgaaaacatgcaccgttaccccaaccaagtgtactacaggcccatggatgagtacagcaaccagaacaactttgtgcacgactgcgtcaatatcacaatcaagcagcacacggtcaccacaaccaccaagggggagaacttcaccgagaccgacgttaagatgatggagcgcgtggttgagcagatgtgtatcacccagtacgagagggaatctcaggcctattaccagagaggatcgagcatggtcctcttctcctctccacctgtgatcctcctgatctctttcctcatcttc

SEQ ID NO: 5-10 - skipped (6 entries)

SEQ ID NO: 11 - DNA, 20 bp, synthetic construct
  source 1..20: mol_type = other DNA
tgcatatttcaaagacctgt

SEQ ID NO: 12 - DNA, 22 bp, synthetic construct
  source 1..22: mol_type = other DNA
ggtggtgtctcactctttcttc

SEQ ID NO: 13 - DNA, 22 bp, synthetic construct
  source 1..22: mol_type = other DNA
ccagcatctcaggtctactcta

SEQ ID NO: 14 - DNA, 23 bp, synthetic construct
  source 1..23: mol_type = other DNA
aatacccttggcactgatgggca

SEQ ID NO: 15-17 - skipped (3 entries)

SEQ ID NO: 18 - DNA, 15 bp, synthetic construct
  source 1..15: mol_type = other DNA
tcgccgcttgctgca

SEQ ID NO: 19 - DNA, 17 bp, synthetic construct
  source 1..17: mol_type = other DNA
atcggccgtgatgtcga

SEQ ID NO: 20 - DNA, 23 bp, synthetic construct
  source 1..23: mol_type = other DNA
ccatggtcaaccccaccgtgttc

SEQ ID NO: 21 - DNA, 17 bp, synthetic construct
  source 1..17: mol_type = other DNA
cctctcctcacgaccga

SEQ ID NO: 22 - DNA, 19 bp, synthetic construct
  source 1..19: mol_type = other DNA
cccagtgttccatcctcca

SEQ ID NO: 23 - DNA, 25 bp, synthetic construct
  source 1..25: mol_type = other DNA
ccacaaagagaaccagcatccagca

SEQ ID NO: 24 - DNA, 20 bp, synthetic construct
  source 1..20: mol_type = other DNA
agtggaacaagccgagtaag

SEQ ID NO: 25 - DNA, 21 bp, synthetic construct
  source 1..21: mol_type = other DNA
cctcatagtcactgccgaaat

SEQ ID NO: 26 - DNA, 24 bp, synthetic construct
  source 1..24: mol_type = other DNA
aaccaacatgaagcacatggctgg

SEQ ID NO: 27 - DNA, 20 bp, synthetic construct
  source 1..20: mol_type = other DNA
ccccgttacataatggagaa

SEQ ID NO: 28 - DNA, 20 bp, synthetic construct
  source 1..20: mol_type = other DNA
gcctgcgggtgccatcgctc

SEQ ID NO: 29 - DNA, 20 bp, synthetic construct
  source 1..20: mol_type = other DNA
gttgataccgcctgcgggtg

SEQ ID NO: 30 - DNA, 20 bp, synthetic construct
  source 1..20: mol_type = other DNA
tgcatcagttgataccgcct

SEQ ID NO: 31 - DNA, 20 bp, synthetic construct
  source 1..20: mol_type = other DNA
gccgggaatgagtcaccgga

SEQ ID NO: 32 - DNA, 20 bp, synthetic construct
  source 1..20: mol_type = other DNA
cgggcggccggccgaggttt

SEQ ID NO: 33 - DNA, 20 bp, synthetic construct
  source 1..20: mol_type = other DNA
cccggcgcacactctgtgcc

SEQ ID NO: 34 - DNA, 20 bp, synthetic construct
  source 1..20: mol_type = other DNA
ccaattgccgcgcggcccgg

SEQ ID NO: 35 - DNA, 20 bp, synthetic construct
  source 1..20: mol_type = other DNA
gaggacaggcgacgcgcggg

SEQ ID NO: 36 - DNA, 20 bp, synthetic construct
  source 1..20: mol_type = other DNA
agcgactggctcggaggaca

SEQ ID NO: 37 - DNA, 20 bp, synthetic construct
  source 1..20: mol_type = other DNA
gagaggagaagctcgcggcg

SEQ ID NO: 38 - DNA, 20 bp, synthetic construct
  source 1..20: mol_type = other DNA
aaggttcgccataatgactg

SEQ ID NO: 39 - DNA, 20 bp, synthetic construct
  source 1..20: mol_type = other DNA
gtatcggctgcccccagtgt

SEQ ID NO: 40 - DNA, 20 bp, synthetic construct
  source 1..20: mol_type = other DNA
gccccgggtatcggctgccc

SEQ ID NO: 41 - DNA, 20 bp, synthetic construct
  source 1..20: mol_type = other DNA
tgggtagcggttgcctccag

SEQ ID NO: 42 - DNA, 20 bp, synthetic construct
  source 1..20: mol_type = other DNA
ccgccctgaggtgggtagcg

SEQ ID NO: 43 - DNA, 20 bp, synthetic construct
  source 1..20: mol_type = other DNA
tggcttactcggcttgttcc

SEQ ID NO: 44 - DNA, 20 bp, synthetic construct
  source 1..20: mol_type = other DNA
gcatgtagccgccaaggccc

SEQ ID NO: 45 - DNA, 20 bp, synthetic construct
  source 1..20: mol_type = other DNA
atgatgggcctgctcatggc

SEQ ID NO: 46 - DNA, 20 bp, synthetic construct
  source 1..20: mol_type = other DNA
gtcctcatagtcactgccga

SEQ ID NO: 47 - DNA, 20 bp, synthetic construct
  source 1..20: mol_type = other DNA
gttttcacgatagtaacggt

SEQ ID NO: 48 - DNA, 20 bp, synthetic construct
  source 1..20: mol_type = other DNA
ggcctgtagtacacttggtt

SEQ ID NO: 49 - DNA, 20 bp, synthetic construct
  source 1..20: mol_type = other DNA
gctgtactcatccatgggcc

SEQ ID NO: 50 - DNA, 20 bp, synthetic construct
  source 1..20: mol_type = other DNA
tggtgaccgtgtgctgcttg

SEQ ID NO: 51 - DNA, 20 bp, synthetic construct
  source 1..20: mol_type = other DNA
aagttctcccccttggtggt

SEQ ID NO: 52 - DNA, 20 bp, synthetic construct
  source 1..20: mol_type = other DNA
gtcggtctcggtgaagttct

SEQ ID NO: 53 - DNA, 20 bp, synthetic construct
  source 1..20: mol_type = other DNA
ctgctcaaccacgcgctcca

SEQ ID NO: 54 - DNA, 20 bp, synthetic construct
  source 1..20: mol_type = other DNA
ctctctggtaataggcctga

SEQ ID NO: 55 - DNA, 20 bp, synthetic construct
  source 1..20: mol_type = other DNA
cgcctccctcaagctggaaa

SEQ ID NO: 56 - DNA, 20 bp, synthetic construct
  source 1..20: mol_type = other DNA
aggtggataccgcctccctc

SEQ ID NO: 57 - DNA, 20 bp, synthetic construct
  source 1..20: mol_type = other DNA
agggtattgattagcctatc

SEQ ID NO: 58 - DNA, 20 bp, synthetic construct
  source 1..20: mol_type = other DNA
agcaacggctcatgatgaac

SEQ ID NO: 59 - DNA, 20 bp, synthetic construct
  source 1..20: mol_type = other DNA
ggcctggcattagcaacggc

SEQ ID NO: 60 - DNA, 20 bp, synthetic construct
  source 1..20: mol_type = other DNA
aacctgttgcactaagtcca

SEQ ID NO: 61 - DNA, 20 bp, synthetic construct
  source 1..20: mol_type = other DNA
gcattagtatactgagctct

SEQ ID NO: 62 - DNA, 20 bp, synthetic construct
  source 1..20: mol_type = other DNA
ggcctcctaacaaacctggc

SEQ ID NO: 63 - DNA, 20 bp, synthetic construct
  source 1..20: mol_type = other DNA
tctcggtacacacagagctc

SEQ ID NO: 64 - DNA, 20 bp, synthetic construct
  source 1..20: mol_type = other DNA
agctgctgtgtagcccatac

SEQ ID NO: 65 - DNA, 20 bp, synthetic construct
  source 1..20: mol_type = other DNA
ccacatatagggtcctttaa

SEQ ID NO: 66 - DNA, 20 bp, synthetic construct
  source 1..20: mol_type = other DNA
gccacatatagggtccttta

SEQ ID NO: 67 - DNA, 20 bp, synthetic construct
  source 1..20: mol_type = other DNA
cacgcaaaagggtttcccac

SEQ ID NO: 68 - DNA, 20 bp, synthetic construct
  source 1..20: mol_type = other DNA
tgcacattgtaagcctaagg

SEQ ID NO: 69 - DNA, 20 bp, synthetic construct
  source 1..20: mol_type = other DNA
tcactcggcccccgcggctc

SEQ ID NO: 70 - DNA, 20 bp, synthetic construct
  source 1..20: mol_type = other DNA
ccgggcacccttgcgcctgg

SEQ ID NO: 71 - DNA, 20 bp, synthetic construct
  source 1..20: mol_type = other DNA
cccgagcggagaccagcgca

SEQ ID NO: 72 - DNA, 20 bp, synthetic construct
  source 1..20: mol_type = other DNA
aagccgcctcacccgagcgg

SEQ ID NO: 73 - DNA, 20 bp, synthetic construct
  source 1..20: mol_type = other DNA
ccagccccccaacgcgcagt

SEQ ID NO: 74 - DNA, 20 bp, synthetic construct
  source 1..20: mol_type = other DNA
cgatcgcccgctgggccgga

SEQ ID NO: 75 - DNA, 20 bp, synthetic construct
  source 1..20: mol_type = other DNA
ctcccggagttccctgggcg

SEQ ID NO: 76 - DNA, 20 bp, synthetic construct
  source 1..20: mol_type = other DNA
tgggccccgatctcggcctc

SEQ ID NO: 77 - DNA, 20 bp, synthetic construct
  source 1..20: mol_type = other DNA
ccggaactcccccggcgggc

SEQ ID NO: 78 - DNA, 20 bp, synthetic construct
  source 1..20: mol_type = other DNA
accgaggctcccggaactcc

SEQ ID NO: 79 - DNA, 20 bp, synthetic construct
  source 1..20: mol_type = other DNA
acggccgcaaggctgcagcc

SEQ ID NO: 80 - DNA, 20 bp, synthetic construct
  source 1..20: mol_type = other DNA
cgcccccgcccgtcagtccg

SEQ ID NO: 81 - DNA, 20 bp, synthetic construct
  source 1..20: mol_type = other DNA
tgaccgtggtggaattgcga

SEQ ID NO: 82 - DNA, 20 bp, synthetic construct
  source 1..20: mol_type = other DNA
tgctaattaaaccgtgatgc

SEQ ID NO: 83 - DNA, 20 bp, synthetic construct
  source 1..20: mol_type = other DNA
gcccccaataactcatacat

SEQ ID NO: 84 - DNA, 20 bp, synthetic construct
  source 1..20: mol_type = other DNA
ggtgcagttaataacccact

SEQ ID NO: 85 - DNA, 20 bp, synthetic construct
  source 1..20: mol_type = other DNA
tagttggttgacagccatgt

SEQ ID NO: 86 - DNA, 20 bp, synthetic construct
  source 1..20: mol_type = other DNA
acctcccttaaagtgatcac

SEQ ID NO: 87 - DNA, 20 bp, synthetic construct
  source 1..20: mol_type = other DNA
agtcagagagtgcctagcga

SEQ ID NO: 88 - DNA, 20 bp, synthetic construct
  source 1..20: mol_type = other DNA
gcttaattagttacatcggg

SEQ ID NO: 89 - DNA, 20 bp, synthetic construct
  source 1..20: mol_type = other DNA
agctagtaagaacttatccc

SEQ ID NO: 90 - DNA, 20 bp, synthetic construct
  source 1..20: mol_type = other DNA
tcttagatttttggacggga

SEQ ID NO: 91 - DNA, 20 bp, synthetic construct
  source 1..20: mol_type = other DNA
agctctattaataggttagg

SEQ ID NO: 92 - DNA, 20 bp, synthetic construct
  source 1..20: mol_type = other DNA
gcggtgatgccatctactga

SEQ ID NO: 93 - DNA, 20 bp, synthetic construct
  source 1..20: mol_type = other DNA
gtggactgctaagactaggg

SEQ ID NO: 94 - DNA, 20 bp, synthetic construct
  source 1..20: mol_type = other DNA
gctatatataggtgacccac

SEQ ID NO: 95 - DNA, 20 bp, synthetic construct
  source 1..20: mol_type = other DNA
gcacgataaagctgactctg

SEQ ID NO: 96 - DNA, 20 bp, synthetic construct
  source 1..20: mol_type = other DNA
tgcaattagtgtgatcatgc

SEQ ID NO: 97 - DNA, 20 bp, synthetic construct
  source 1..20: mol_type = other DNA
agtggcctagtcctctggca

SEQ ID NO: 98 - DNA, 20 bp, synthetic construct
  source 1..20: mol_type = other DNA
agttaaggatctatgagctc

SEQ ID NO: 99 - DNA, 20 bp, synthetic construct
  source 1..20: mol_type = other DNA
cgcttgacccatagacatgc

SEQ ID NO: 100 - DNA, 20 bp, synthetic construct
  source 1..20: mol_type = other DNA
tgggccccatgtaacctggt

SEQ ID NO: 101 - DNA, 20 bp, synthetic construct
  source 1..20: mol_type = other DNA
tcctcttaatatgcgggtca

SEQ ID NO: 102 - DNA, 20 bp, synthetic construct
  source 1..20: mol_type = other DNA
gaccatcttattcggtgctt

SEQ ID NO: 103 - DNA, 20 bp, synthetic construct
  source 1..20: mol_type = other DNA
ccaatgctctagagtgactg

SEQ ID NO: 104 - DNA, 20 bp, synthetic construct
  source 1..20: mol_type = other DNA
gcaaccgaaactgttgccaa

SEQ ID NO: 105 - DNA, 20 bp, synthetic construct
  source 1..20: mol_type = other DNA
ctccccgttacataatggag

SEQ ID NO: 106 - DNA, 20 bp, synthetic construct
  source 1..20: mol_type = other DNA
ccgcctgcgggtgccatcgc

SEQ ID NO: 107 - DNA, 20 bp, synthetic construct
  source 1..20: mol_type = other DNA
agttgataccgcctgcgggt

SEQ ID NO: 108 - DNA, 20 bp, synthetic construct
  source 1..20: mol_type = other DNA
cttgcatcagttgataccgc

SEQ ID NO: 109 - DNA, 20 bp, synthetic construct
  source 1..20: mol_type = other DNA
ggccgggaatgagtcaccgg

SEQ ID NO: 110 - DNA, 20 bp, synthetic construct
  source 1..20: mol_type = other DNA
gcgggcggccggccgaggtt

SEQ ID NO: 111 - DNA, 20 bp, synthetic construct
  source 1..20: mol_type = other DNA
cgcggcccggcgcacactct

SEQ ID NO: 112 - DNA, 20 bp, synthetic construct
  source 1..20: mol_type = other DNA
gaccaattgccgcgcggccc

SEQ ID NO: 113 - DNA, 20 bp, synthetic construct
  source 1..20: mol_type = other DNA
ggaggacaggcgacgcgcgg

SEQ ID NO: 114 - DNA, 20 bp, synthetic construct
  source 1..20: mol_type = other DNA
tcagcgactggctcggagga

SEQ ID NO: 115 - DNA, 20 bp, synthetic construct
  source 1..20: mol_type = other DNA
cgccataatgactgctctgc

SEQ ID NO: 116 - DNA, 20 bp, synthetic construct
  source 1..20: mol_type = other DNA
ccaaggttcgccataatgac

SEQ ID NO: 117 - DNA, 20 bp, synthetic construct
  source 1..20: mol_type = other DNA
ggtatcggctgcccccagtg

SEQ ID NO: 118 - DNA, 20 bp, synthetic construct
  source 1..20: mol_type = other DNA
tgccccgggtatcggctgcc

SEQ ID NO: 119 - DNA, 20 bp, synthetic construct
  source 1..20: mol_type = other DNA
gtgggtagcggttgcctcca

SEQ ID NO: 120 - DNA, 20 bp, synthetic construct
  source 1..20: mol_type = other DNA
ccaccgccctgaggtgggta

SEQ ID NO: 121 - DNA, 20 bp, synthetic construct
  source 1..20: mol_type = other DNA
ttggcttactcggcttgttc

SEQ ID NO: 122 - DNA, 20 bp, synthetic construct
  source 1..20: mol_type = other DNA
agcatgtagccgccaaggcc

SEQ ID NO: 123 - DNA, 20 bp, synthetic construct
  source 1..20: mol_type = other DNA
tgtatgatgggcctgctcat

SEQ ID NO: 124 - DNA, 20 bp, synthetic construct
  source 1..20: mol_type = other DNA
ggtcctcatagtcactgccg

SEQ ID NO: 125 - DNA, 20 bp, synthetic construct
  source 1..20: mol_type = other DNA
acggtgcatgttttcacgat

SEQ ID NO: 126 - DNA, 20 bp, synthetic construct
  source 1..20: mol_type = other DNA
gggcctgtagtacacttggt

SEQ ID NO: 127 - DNA, 20 bp, synthetic construct
  source 1..20: mol_type = other DNA
cgtgcacaaagttgttctgg

SEQ ID NO: 128 - DNA, 20 bp, synthetic construct
  source 1..20: mol_type = other DNA
gtggtgaccgtgtgctgctt

SEQ ID NO: 129 - DNA, 20 bp, synthetic construct
  source 1..20: mol_type = other DNA
cggtgaagttctcccccttg

SEQ ID NO: 130 - DNA, 20 bp, synthetic construct
  source 1..20: mol_type = other DNA
cgtcggtctcggtgaagttc

SEQ ID NO: 131 - DNA, 20 bp, synthetic construct
  source 1..20: mol_type = other DNA
tctgctcaaccacgcgctcc

SEQ ID NO: 132 - DNA, 20 bp, synthetic construct
  source 1..20: mol_type = other DNA
tgctcgatcctctctggtaa

SEQ ID NO: 133 - DNA, 20 bp, synthetic construct
  source 1..20: mol_type = other DNA
gataccgcctccctcaagct

SEQ ID NO: 134 - DNA, 20 bp, synthetic construct
  source 1..20: mol_type = other DNA
caggtggataccgcctccct

SEQ ID NO: 135 - DNA, 20 bp, synthetic construct
  source 1..20: mol_type = other DNA
ccaagggtattgattagcct

SEQ ID NO: 136 - DNA, 20 bp, synthetic construct
  source 1..20: mol_type = other DNA
gcattagcaacggctcatga

SEQ ID NO: 137 - DNA, 20 bp, synthetic construct
  source 1..20: mol_type = other DNA
ctggcctggcattagcaacg

SEQ ID NO: 138 - DNA, 20 bp, synthetic construct
  source 1..20: mol_type = other DNA
tcaacctgttgcactaagtc

SEQ ID NO: 139 - DNA, 20 bp, synthetic construct
  source 1..20: mol_type = other DNA
ggcattagtatactgagctc

SEQ ID NO: 140 - DNA, 20 bp, synthetic construct
  source 1..20: mol_type = other DNA
gtatcatgtggcctcctaac

SEQ ID NO: 141 - DNA, 20 bp, synthetic construct
  source 1..20: mol_type = other DNA
gttctcggtacacacagagc

SEQ ID NO: 142 - DNA, 20 bp, synthetic construct
  source 1..20: mol_type = other DNA
ctagccagaggttcagtgtt

SEQ ID NO: 143 - DNA, 20 bp, synthetic construct
  source 1..20: mol_type = other DNA
atgccacatatagggtcctt

SEQ ID NO: 144 - DNA, 20 bp, synthetic construct
  source 1..20: mol_type = other DNA
ccacgcaaaagggtttccca

SEQ ID NO: 145 - DNA, 20 bp, synthetic construct
  source 1..20: mol_type = other DNA
agtgcacattgtaagcctaa

SEQ ID NO: 146 - DNA, 20 bp, synthetic construct
  source 1..20: mol_type = other DNA
tcctcactcggcccccgcgg

SEQ ID NO: 147 - DNA, 20 bp, synthetic construct
  source 1..20: mol_type = other DNA
ccggccgggcacccttgcgc

SEQ ID NO: 148 - DNA, 20 bp, synthetic construct
  source 1..20: mol_type = other DNA
cacccgagcggagaccagcg

SEQ ID NO: 149 - DNA, 20 bp, synthetic construct
  source 1..20: mol_type = other DNA
ccaagccgcctcacccgagc

SEQ ID NO: 150 - DNA, 20 bp, synthetic construct
  source 1..20: mol_type = other DNA
ccaccgacctccctaacggg

SEQ ID NO: 151 - DNA, 20 bp, synthetic construct
  source 1..20: mol_type = other DNA
gcgatcgcccgctgggccgg

SEQ ID NO: 152 - DNA, 20 bp, synthetic construct
  source 1..20: mol_type = other DNA
cggccctcccggagttccct

SEQ ID NO: 153 - DNA, 20 bp, synthetic construct
  source 1..20: mol_type = other DNA
ttctgggccccgatctcggc

SEQ ID NO: 154 - DNA, 20 bp, synthetic construct
  source 1..20: mol_type = other DNA
cccggaactcccccggcggg

SEQ ID NO: 155 - DNA, 20 bp, synthetic construct
  source 1..20: mol_type = other DNA
gcaccgaggctcccggaact

SEQ ID NO: 156 - DNA, 20 bp, synthetic construct
  source 1..20: mol_type = other DNA
ggtggcaacggccgcaaggc

SEQ ID NO: 157 - DNA, 20 bp, synthetic construct
  source 1..20: mol_type = other DNA
tggttgttccttggagcccc

SEQ ID NO: 158 - DNA, 20 bp, synthetic construct
  source 1..20: mol_type = other DNA
tgtgaccgtggtggaattgc

SEQ ID NO: 159 - DNA, 20 bp, synthetic construct
  source 1..20: mol_type = other DNA
ggtgtggaagacttgtgtta

SEQ ID NO: 160 - DNA, 20 bp, synthetic construct
  source 1..20: mol_type = other DNA
gcatcaccagattgcttaac

SEQ ID NO: 161 - DNA, 20 bp, synthetic construct
  source 1..20: mol_type = other DNA
aggtgcagttaataacccac

SEQ ID NO: 162 - DNA, 20 bp, synthetic construct
  source 1..20: mol_type = other DNA
ggctagttggttgacagcca

SEQ ID NO: 163 - DNA, 20 bp, synthetic construct
  source 1..20: mol_type = other DNA
cccgtgatcaggcttcagtg

SEQ ID NO: 164 - DNA, 20 bp, synthetic construct
  source 1..20: mol_type = other DNA
cagtcagagagtgcctagcg

SEQ ID NO: 165 - DNA, 20 bp, synthetic construct
  source 1..20: mol_type = other DNA
agcttaattagttacatcgg

SEQ ID NO: 166 - DNA, 20 bp, synthetic construct
  source 1..20: mol_type = other DNA
ccccgttcatcttattccca

SEQ ID NO: 167 - DNA, 20 bp, synthetic construct
  source 1..20: mol_type = other DNA
tctcttagatttttggacgg

SEQ ID NO: 168 - DNA, 20 bp, synthetic construct
  source 1..20: mol_type = other DNA
gtgggcacacttagccaccc

SEQ ID NO: 169 - DNA, 20 bp, synthetic construct
  source 1..20: mol_type = other DNA
ggtctgggacttccataacc

SEQ ID NO: 170 - DNA, 20 bp, synthetic construct
  source 1..20: mol_type = other DNA
ggtggactgctaagactagg

SEQ ID NO: 171 - DNA, 20 bp, synthetic construct
  source 1..20: mol_type = other DNA
agctatatataggtgaccca

SEQ ID NO: 172 - DNA, 20 bp, synthetic construct
  source 1..20: mol_type = other DNA
aagattcttgttcagcacga

SEQ ID NO: 173 - DNA, 20 bp, synthetic construct
  source 1..20: mol_type = other DNA
ccattgtcatgggactcaag

SEQ ID NO: 174 - DNA, 20 bp, synthetic construct
  source 1..20: mol_type = other DNA
tagtggcctagtcctctggc

SEQ ID NO: 175 - DNA, 20 bp, synthetic construct
  source 1..20: mol_type = other DNA
gagttaaggatctatgagct

SEQ ID NO: 176 - DNA, 20 bp, synthetic construct
  source 1..20: mol_type = other DNA
cgggagtgcaggctccttta

SEQ ID NO: 177 - DNA, 20 bp, synthetic construct
  source 1..20: mol_type = other DNA
cgtggccatactggctgggc

SEQ ID NO: 178 - DNA, 20 bp, synthetic construct
  source 1..20: mol_type = other DNA
ctcctcttaatatgcgggtc

SEQ ID NO: 179 - DNA, 20 bp, synthetic construct
  source 1..20: mol_type = other DNA
acatgaccatcttattcggt

SEQ ID NO: 180 - DNA, 20 bp, synthetic construct
  source 1..20: mol_type = other DNA
aactagggcaccatcccctc

SEQ ID NO: 181 - DNA, 20 bp, synthetic construct
  source 1..20: mol_type = other DNA
acagtacctgctgtacccta

SEQ ID NO: 182 - DNA, 20 bp, synthetic construct
  source 1..20: mol_type = other DNA
ccagctccccgttacataat

SEQ ID NO: 183 - DNA, 20 bp, synthetic construct
  source 1..20: mol_type = other DNA
accgcctgcgggtgccatcg

SEQ ID NO: 184 - DNA, 20 bp, synthetic construct
  source 1..20: mol_type = other DNA
cagttgataccgcctgcggg

SEQ ID NO: 185 - DNA, 20 bp, synthetic construct
  source 1..20: mol_type = other DNA
acttgcatcagttgataccg

SEQ ID NO: 186 - DNA, 20 bp, synthetic construct
  source 1..20: mol_type = other DNA
cgaggtttaagttaaagggt

SEQ ID NO: 187 - DNA, 20 bp, synthetic construct
  source 1..20: mol_type = other DNA
tctgtgcccccggcgggcgg

SEQ ID NO: 188 - DNA, 20 bp, synthetic construct
  source 1..20: mol_type = other DNA
cgcgcggcccggcgcacact

SEQ ID NO: 189 - DNA, 20 bp, synthetic construct
  source 1..20: mol_type = other DNA
ggaccaattgccgcgcggcc

SEQ ID NO: 190 - DNA, 20 bp, synthetic construct
  source 1..20: mol_type = other DNA
cggaggacaggcgacgcgcg

SEQ ID NO: 191 - DNA, 20 bp, synthetic construct
  source 1..20: mol_type = other DNA
gctgtcagcgactggctcgg

SEQ ID NO: 192 - DNA, 20 bp, synthetic construct
  source 1..20: mol_type = other DNA
tcgccataatgactgctctg

SEQ ID NO: 193 - DNA, 20 bp, synthetic construct
  source 1..20: mol_type = other DNA
gcagccaaggttcgccataa

SEQ ID NO: 194 - DNA, 20 bp, synthetic construct
  source 1..20: mol_type = other DNA
gggtatcggctgcccccagt

SEQ ID NO: 195 - DNA, 20 bp, synthetic construct
  source 1..20: mol_type = other DNA
ccctgccccgggtatcggct

SEQ ID NO: 196 - DNA, 20 bp, synthetic construct
  source 1..20: mol_type = other DNA
ggtgggtagcggttgcctcc

SEQ ID NO: 197 - DNA, 20 bp, synthetic construct
  source 1..20: mol_type = other DNA
tactcggcttgttccactga

SEQ ID NO: 198 - DNA, 20 bp, synthetic construct
  source 1..20: mol_type = other DNA
gtttttggcttactcggctt

SEQ ID NO: 199 - DNA, 20 bp, synthetic construct
  source 1..20: mol_type = other DNA
cagcatgtagccgccaaggc

SEQ ID NO: 200 - DNA, 20 bp, synthetic construct
  source 1..20: mol_type = other DNA
atgtatgatgggcctgctca

SEQ ID NO: 201 - DNA, 20 bp, synthetic construct
  source 1..20: mol_type = other DNA
acgatagtaacggtcctcat

SEQ ID NO: 202 - DNA, 20 bp, synthetic construct
  source 1..20: mol_type = other DNA
aacggtgcatgttttcacga

SEQ ID NO: 203 - DNA, 20 bp, synthetic construct
  source 1..20: mol_type = other DNA
tgggcctgtagtacacttgg

SEQ ID NO: 204 - DNA, 20 bp, synthetic construct
  source 1..20: mol_type = other DNA
cgtgtgctgcttgattgtga

SEQ ID NO: 205 - DNA, 20 bp, synthetic construct
  source 1..20: mol_type = other DNA
tgtggtgaccgtgtgctgct

SEQ ID NO: 206 - DNA, 20 bp, synthetic construct
  source 1..20: mol_type = other DNA
tcggtgaagttctccccctt

SEQ ID NO: 207 - DNA, 20 bp, synthetic construct
  source 1..20: mol_type = other DNA
ccacgcgctccatcatctta

SEQ ID NO: 208 - DNA, 20 bp, synthetic construct
  source 1..20: mol_type = other DNA
acatctgctcaaccacgcgc

SEQ ID NO: 209 - DNA, 20 bp, synthetic construct
  source 1..20: mol_type = other DNA
atgctcgatcctctctggta

SEQ ID NO: 210 - DNA, 20 bp, synthetic construct
  source 1..20: mol_type = other DNA
ggataccgcctccctcaagc

SEQ ID NO: 211 - DNA, 20 bp, synthetic construct
  source 1..20: mol_type = other DNA
gctgcaggtggataccgcct

SEQ ID NO: 212 - DNA, 20 bp, synthetic construct
  source 1..20: mol_type = other DNA
gccaagggtattgattagcc

SEQ ID NO: 213 - DNA, 20 bp, synthetic construct
  source 1..20: mol_type = other DNA
ggcattagcaacggctcatg

SEQ ID NO: 214 - DNA, 20 bp, synthetic construct
  source 1..20: mol_type = other DNA
tttactggcctggcattagc

SEQ ID NO: 215 - DNA, 20 bp, synthetic construct
  source 1..20: mol_type = other DNA
ttagcctcaacctgttgcac

SEQ ID NO: 216 - DNA, 20 bp, synthetic construct
  source 1..20: mol_type = other DNA
gggcattagtatactgagct

SEQ ID NO: 217 - DNA, 20 bp, synthetic construct
  source 1..20: mol_type = other DNA
atgctccagcgggctgagcc

SEQ ID NO: 218 - DNA, 20 bp, synthetic construct
  source 1..20: mol_type = other DNA
cccagttctcggtacacaca

SEQ ID NO: 219 - DNA, 20 bp, synthetic construct
  source 1..20: mol_type = other DNA
tgtcctctagccagaggttc

SEQ ID NO: 220 - DNA, 20 bp, synthetic construct
  source 1..20: mol_type = other DNA
gaatgccacatatagggtcc

SEQ ID NO: 221 - DNA, 20 bp, synthetic construct
  source 1..20: mol_type = other DNA
accacgcaaaagggtttccc

SEQ ID NO: 222 - DNA, 20 bp, synthetic construct
  source 1..20: mol_type = other DNA
aacgattcagtgcacattgt

SEQ ID NO: 223 - DNA, 20 bp, synthetic construct
  source 1..20: mol_type = other DNA
gtcctcactcggcccccgcg

SEQ ID NO: 224 - DNA, 20 bp, synthetic construct
  source 1..20: mol_type = other DNA
cgcccggccgggcacccttg

SEQ ID NO: 225 - DNA, 20 bp, synthetic construct
  source 1..20: mol_type = other DNA
tcacccgagcggagaccagc

SEQ ID NO: 226 - DNA, 20 bp, synthetic construct
  source 1..20: mol_type = other DNA
aagccaagccgcctcacccg

SEQ ID NO: 227 - DNA, 20 bp, synthetic construct
  source 1..20: mol_type = other DNA
gcgctgagacaccccggcgc

SEQ ID NO: 228 - DNA, 20 bp, synthetic construct
  source 1..20: mol_type = other DNA
agcgatcgcccgctgggccg

SEQ ID NO: 229 - DNA, 20 bp, synthetic construct
  source 1..20: mol_type = other DNA
gcggccctcccggagttccc

SEQ ID NO: 230 - DNA, 20 bp, synthetic construct
  source 1..20: mol_type = other DNA
cgttctgggccccgatctcg

SEQ ID NO: 231 - DNA, 20 bp, synthetic construct
  source 1..20: mol_type = other DNA
tcccggaactcccccggcgg

SEQ ID NO: 232 - DNA, 20 bp, synthetic construct
  source 1..20: mol_type = other DNA
ccgcctcccgggaggaacgc

SEQ ID NO: 233 - DNA, 20 bp, synthetic construct
  source 1..20: mol_type = other DNA
ccaggcggtggcaacggccg

SEQ ID NO: 234 - DNA, 20 bp, synthetic construct
  source 1..20: mol_type = other DNA
ccgaggctggttgttccttg

SEQ ID NO: 235 - DNA, 20 bp, synthetic construct
  source 1..20: mol_type = other DNA
ggcgaggatggatgtgaccg

SEQ ID NO: 236 - DNA, 20 bp, synthetic construct
  source 1..20: mol_type = other DNA
tcggtgtggaagacttgtgt

SEQ ID NO: 237 - DNA, 20 bp, synthetic construct
  source 1..20: mol_type = other DNA
ggtgttatacatttaggctc

SEQ ID NO: 238 - DNA, 20 bp, synthetic construct
  source 1..20: mol_type = other DNA
gctaaactagatttgtgcct

SEQ ID NO: 239 - DNA, 20 bp, synthetic construct
  source 1..20: mol_type = other DNA
tggctagttggttgacagcc

SEQ ID NO: 240 - DNA, 20 bp, synthetic construct
  source 1..20: mol_type = other DNA
ggaattggcacccgtgatca

SEQ ID NO: 241 - DNA, 20 bp, synthetic construct
  source 1..20: mol_type = other DNA
ccagtcagagagtgcctagc

SEQ ID NO: 242 - DNA, 20 bp, synthetic construct
  source 1..20: mol_type = other DNA
cactaaagccttctagccca

SEQ ID NO: 243 - DNA, 20 bp, synthetic construct
  source 1..20: mol_type = other DNA
ggtgcacttgacctgccagg

SEQ ID NO: 244 - DNA, 20 bp, synthetic construct
  source 1..20: mol_type = other DNA
agtccctaaatcagctgtag

SEQ ID NO: 245 - DNA, 20 bp, synthetic construct
  source 1..20: mol_type = other DNA
ggtgggcacacttagccacc

SEQ ID NO: 246 - DNA, 20 bp, synthetic construct
  source 1..20: mol_type = other DNA
tgagagttgcccgggtctgg

SEQ ID NO: 247 - DNA, 20 bp, synthetic construct
  source 1..20: mol_type = other DNA
gatcaaatctgtggagcccc

SEQ ID NO: 248 - DNA, 20 bp, synthetic construct
  source 1..20: mol_type = other DNA
cagctatatataggtgaccc

SEQ ID NO: 249 - DNA, 20 bp, synthetic construct
  source 1..20: mol_type = other DNA
ttccatggtcttgatggcga

SEQ ID NO: 250 - DNA, 20 bp, synthetic construct
  source 1..20: mol_type = other DNA
ggtcaatacctgtttattac

SEQ ID NO: 251 - DNA, 20 bp, synthetic construct
  source 1..20: mol_type = other DNA
gtagtggcctagtcctctgg

SEQ ID NO: 252 - DNA, 20 bp, synthetic construct
  source 1..20: mol_type = other DNA
cgggctttgaatgtgcctca

SEQ ID NO: 253 - DNA, 20 bp, synthetic construct
  source 1..20: mol_type = other DNA
ggctaaagtttgctcagtgg

SEQ ID NO: 254 - DNA, 20 bp, synthetic construct
  source 1..20: mol_type = other DNA
agtgaggctcctttgtactc

SEQ ID NO: 255 - DNA, 20 bp, synthetic construct
  source 1..20: mol_type = other DNA
tctcctcttaatatgcgggt

SEQ ID NO: 256 - DNA, 20 bp, synthetic construct
  source 1..20: mol_type = other DNA
aacatgaccatcttattcgg

SEQ ID NO: 257 - DNA, 20 bp, synthetic construct
  source 1..20: mol_type = other DNA
gctactcatacaccccagga

SEQ ID NO: 258 - DNA, 20 bp, synthetic construct
  source 1..20: mol_type = other DNA
aacagtacctgctgtaccct

SEQ ID NO: 259 - DNA, 20 bp, synthetic construct
  source 1..20: mol_type = other DNA
tccagctccccgttacataa

SEQ ID NO: 260 - DNA, 20 bp, synthetic construct
  source 1..20: mol_type = other DNA
taccgcctgcgggtgccatc

SEQ ID NO: 261 - DNA, 20 bp, synthetic construct
  source 1..20: mol_type = other DNA
tcagttgataccgcctgcgg

SEQ ID NO: 262 - DNA, 20 bp, synthetic construct
  source 1..20: mol_type = other DNA
cacttgcatcagttgatacc

SEQ ID NO: 263 - DNA, 20 bp, synthetic construct
  source 1..20: mol_type = other DNA
ggccggccgaggtttaagtt

SEQ ID NO: 264 - DNA, 20 bp, synthetic construct
  source 1..20: mol_type = other DNA
cgcacactctgtgcccccgg

SEQ ID NO: 265 - DNA, 20 bp, synthetic construct
  source 1..20: mol_type = other DNA
tgccgcgcggcccggcgcac

SEQ ID NO: 266 - DNA, 20 bp, synthetic construct
  source 1..20: mol_type = other DNA
gggaccaattgccgcgcggc

SEQ ID NO: 267 - DNA, 20 bp, synthetic construct
  source 1..20: mol_type = other DNA
tcggaggacaggcgacgcgc

SEQ ID NO: 268 - DNA, 20 bp, synthetic construct
  source 1..20: mol_type = other DNA
cggctgtcagcgactggctc

SEQ ID NO: 269 - DNA, 20 bp, synthetic construct
  source 1..20: mol_type = other DNA
ttcgccataatgactgctct

SEQ ID NO: 270 - DNA, 20 bp, synthetic construct
  source 1..20: mol_type = other DNA
agcagccaaggttcgccata

SEQ ID NO: 271 - DNA, 20 bp, synthetic construct
  source 1..20: mol_type = other DNA
cgggtatcggctgcccccag

SEQ ID NO: 272 - DNA, 20 bp, synthetic construct
  source 1..20: mol_type = other DNA
gccctgccccgggtatcggc

SEQ ID NO: 273 - DNA, 20 bp, synthetic construct
  source 1..20: mol_type = other DNA
aggtgggtagcggttgcctc

SEQ ID NO: 274 - DNA, 20 bp, synthetic construct
  source 1..20: mol_type = other DNA
ttactcggcttgttccactg

SEQ ID NO: 275 - DNA, 20 bp, synthetic construct
  source 1..20: mol_type = other DNA
ggtttttggcttactcggct

SEQ ID NO: 276 - DNA, 20 bp, synthetic construct
  source 1..20: mol_type = other DNA
ccagcatgtagccgccaagg

SEQ ID NO: 277 - DNA, 20 bp, synthetic construct
  source 1..20: mol_type = other DNA
gccgaaatgtatgatgggcc

SEQ ID NO: 278 - DNA, 20 bp, synthetic construct
  source 1..20: mol_type = other DNA
cacgatagtaacggtcctca

SEQ ID NO: 279 - DNA, 20 bp, synthetic construct
  source 1..20: mol_type = other DNA
ggtaacggtgcatgttttca

SEQ ID NO: 280 - DNA, 20 bp, synthetic construct
  source 1..20: mol_type = other DNA
ccatgggcctgtagtacact

SEQ ID NO: 281 - DNA, 20 bp, synthetic construct
  source 1..20: mol_type = other DNA
ccgtgtgctgcttgattgtg

SEQ ID NO: 282 - DNA, 20 bp, synthetic construct
  source 1..20: mol_type = other DNA
ttgtggtgaccgtgtgctgc

SEQ ID NO: 283 - DNA, 20 bp, synthetic construct
  source 1..20: mol_type = other DNA
ctcggtgaagttctccccct

SEQ ID NO: 284 - DNA, 20 bp, synthetic construct
  source 1..20: mol_type = other DNA
aaccacgcgctccatcatct

SEQ ID NO: 285 - DNA, 20 bp, synthetic construct
  source 1..20: mol_type = other DNA
tacacatctgctcaaccacg

SEQ ID NO: 286 - DNA, 20 bp, synthetic construct
  source 1..20: mol_type = other DNA
gaggaccatgctcgatcctc

SEQ ID NO: 287 - DNA, 20 bp, synthetic construct
  source 1..20: mol_type = other DNA
tggataccgcctccctcaag

SEQ ID NO: 288 - DNA, 20 bp, synthetic construct
  source 1..20: mol_type = other DNA
gtattgattagcctatccgg

SEQ ID NO: 289 - DNA, 20 bp, synthetic construct
  source 1..20: mol_type = other DNA
tgccaagggtattgattagc

SEQ ID NO: 290 - DNA, 20 bp, synthetic construct
  source 1..20: mol_type = other DNA
tggcattagcaacggctcat

SEQ ID NO: 291 - DNA, 20 bp, synthetic construct
  source 1..20: mol_type = other DNA
gttatacttttactggcctg

SEQ ID NO: 292 - DNA, 20 bp, synthetic construct
  source 1..20: mol_type = other DNA
gtatactgagctctagctgc

SEQ ID NO: 293 - DNA, 20 bp, synthetic construct
  source 1..20: mol_type = other DNA
agggcattagtatactgagc

SEQ ID NO: 294 - DNA, 20 bp, synthetic construct
  source 1..20: mol_type = other DNA
catgctccagcgggctgagc

SEQ ID NO: 295 - DNA, 20 bp, synthetic construct
  source 1..20: mol_type = other DNA
acatcaccccagttctcggt

SEQ ID NO: 296 - DNA, 20 bp, synthetic construct
  source 1..20: mol_type = other DNA
gtgaatatgtcctctagcca

SEQ ID NO: 297 - DNA, 20 bp, synthetic construct
  source 1..20: mol_type = other DNA
ggaatgccacatatagggtc

SEQ ID NO: 298 - DNA, 20 bp, synthetic construct
  source 1..20: mol_type = other DNA
gtaagcctaaggaccacgca

SEQ ID NO: 299 - DNA, 20 bp, synthetic construct
  source 1..20: mol_type = other DNA
cctgttaatggtgtccactt

SEQ ID NO: 300 - DNA, 20 bp, synthetic construct
  source 1..20: mol_type = other DNA
ccttgcgcctgggacccgag

SEQ ID NO: 301 - DNA, 20 bp, synthetic construct
  source 1..20: mol_type = other DNA
ccgggcaggcccgagacgcg

SEQ ID NO: 302 - DNA, 20 bp, synthetic construct
  source 1..20: mol_type = other DNA
ctcacccgagcggagaccag

SEQ ID NO: 303 - DNA, 20 bp, synthetic construct
  source 1..20: mol_type = other DNA
cgaagccaagccgcctcacc

SEQ ID NO: 304 - DNA, 20 bp, synthetic construct
  source 1..20: mol_type = other DNA
ccgctgggccggacccgcgc

SEQ ID NO: 305 - DNA, 20 bp, synthetic construct
  source 1..20: mol_type = other DNA
ccagcgatcgcccgctgggc

SEQ ID NO: 306 - DNA, 20 bp, synthetic construct
  source 1..20: mol_type = other DNA
gctggcggccctcccggagt

SEQ ID NO: 307 - DNA, 20 bp, synthetic construct
  source 1..20: mol_type = other DNA
gcaccctctgggcatcgcgg

SEQ ID NO: 308 - DNA, 20 bp, synthetic construct
  source 1..20: mol_type = other DNA
ctcccggaactcccccggcg

SEQ ID NO: 309 - DNA, 20 bp, synthetic construct
  source 1..20: mol_type = other DNA
cctcggagaagctcaggcgg

SEQ ID NO: 310 - DNA, 20 bp, synthetic construct
  source 1..20: mol_type = other DNA
tctccaggcggtggcaacgg

SEQ ID NO: 311 - DNA, 20 bp, synthetic construct
  source 1..20: mol_type = other DNA
tccgaggctggttgttcctt

SEQ ID NO: 312 - DNA, 20 bp, synthetic construct
  source 1..20: mol_type = other DNA
gctgtggctctgcgatggcg

SEQ ID NO: 313 - DNA, 20 bp, synthetic construct
  source 1..20: mol_type = other DNA
gcaaccttccagcaagggtt

SEQ ID NO: 314 - DNA, 20 bp, synthetic construct
  source 1..20: mol_type = other DNA
ctggtgttatacatttaggc

SEQ ID NO: 315 - DNA, 20 bp, synthetic construct
  source 1..20: mol_type = other DNA
acaatctgttgtggttcagc

SEQ ID NO: 316 - DNA, 20 bp, synthetic construct
  source 1..20: mol_type = other DNA
gtttggctagttggttgaca

SEQ ID NO: 317 - DNA, 20 bp, synthetic construct
  source 1..20: mol_type = other DNA
tcagggaattggcacccgtg

SEQ ID NO: 318 - DNA, 20 bp, synthetic construct
  source 1..20: mol_type = other DNA
ggtccatgatcagaattacc

SEQ ID NO: 319 - DNA, 20 bp, synthetic construct
  source 1..20: mol_type = other DNA
gcactaaagccttctagccc

SEQ ID NO: 320 - DNA, 20 bp, synthetic construct
  source 1..20: mol_type = other DNA
agggtgcacttgacctgcca

SEQ ID NO: 321 - DNA, 20 bp, synthetic construct
  source 1..20: mol_type = other DNA
gagtccctaaatcagctgta

SEQ ID NO: 322 - DNA, 20 bp, synthetic construct
  source 1..20: mol_type = other DNA
gctagtacacaggtgggcac

SEQ ID NO: 323 - DNA, 20 bp, synthetic construct
  source 1..20: mol_type = other DNA
ggagtgagagttgcccgggt

SEQ ID NO: 324 - DNA, 20 bp, synthetic construct
  source 1..20: mol_type = other DNA
ggtgggcttaaggaccaaaa

SEQ ID NO: 325 - DNA, 20 bp, synthetic construct
  source 1..20: mol_type = other DNA
gatttggaacctgcatggct

SEQ ID NO: 326 - DNA, 20 bp, synthetic construct
  source 1..20: mol_type = other DNA
agcctacgaaaaccaacggc

SEQ ID NO: 327 - DNA, 20 bp, synthetic construct
  source 1..20: mol_type = other DNA
ggtaatggtcaatacctgtt

SEQ ID NO: 328 - DNA, 20 bp, synthetic construct
  source 1..20: mol_type = other DNA
aagtagtggcctagtcctct

SEQ ID NO: 329 - DNA, 20 bp, synthetic construct
  source 1..20: mol_type = other DNA
gagtcgggctttgaatgtgc

SEQ ID NO: 330 - DNA, 20 bp, synthetic construct
  source 1..20: mol_type = other DNA
ccatgtaacctggttcaggc

SEQ ID NO: 331 - DNA, 20 bp, synthetic construct
  source 1..20: mol_type = other DNA
cgggtcacatcatgccactt

SEQ ID NO: 332 - DNA, 20 bp, synthetic construct
  source 1..20: mol_type = other DNA
tcttattcggtgcttccatc

SEQ ID NO: 333 - DNA, 20 bp, synthetic construct
  source 1..20: mol_type = other DNA
atctcagtagctctaccttg

SEQ ID NO: 334 - DNA, 20 bp, synthetic construct
  source 1..20: mol_type = other DNA
ccctgatgtagtccccacaa

SEQ ID NO: 335 - DNA, 20 bp, synthetic construct
  source 1..20: mol_type = other DNA
gggcacttagctccaagagc

SEQ ID NO: 336 - DNA, 20 bp, synthetic construct
  source 1..20: mol_type = other DNA
tctttaattggaaattcggc

SEQ ID NO: 337 - DNA, 20 bp, synthetic construct
  source 1..20: mol_type = other DNA
ataccgcctgcgggtgccat

SEQ ID NO: 338 - DNA, 20 bp, synthetic construct
  source 1..20: mol_type = other DNA
catcagttgataccgcctgc

SEQ ID NO: 339 - DNA, 20 bp, synthetic construct
  source 1..20: mol_type = other DNA
gattcgcttgaacacttgca

SEQ ID NO: 340 - DNA, 20 bp, synthetic construct
  source 1..20: mol_type = other DNA
gcggccggccgaggtttaag

SEQ ID NO: 341 - DNA, 20 bp, synthetic construct
  source 1..20: mol_type = other DNA
cggcgcacactctgtgcccc

SEQ ID NO: 342 - DNA, 20 bp, synthetic construct
  source 1..20: mol_type = other DNA
attgccgcgcggcccggcgc

SEQ ID NO: 343 - DNA, 20 bp, synthetic construct
  source 1..20: mol_type = other DNA
gctcgcgggcggaggtcggc

SEQ ID NO: 344 - DNA, 20 bp, synthetic construct
  source 1..20: mol_type = other DNA
gctcggaggacaggcgacgc

SEQ ID NO: 345 - DNA, 20 bp, synthetic construct
  source 1..20: mol_type = other DNA
ccgcggctgtcagcgactgg

SEQ ID NO: 346 - DNA, 20 bp, synthetic construct
  source 1..20: mol_type = other DNA
gttcgccataatgactgctc

SEQ ID NO: 347 - DNA, 20 bp, synthetic construct
  source 1..20: mol_type = other DNA
tccagcagccaaggttcgcc

SEQ ID NO: 348 - DNA, 20 bp, synthetic construct
  source 1..20: mol_type = other DNA
ccgggtatcggctgccccca

SEQ ID NO: 349 - DNA, 20 bp, synthetic construct
  source 1..20: mol_type = other DNA
tgccctgccccgggtatcgg

SEQ ID NO: 350 - DNA, 20 bp, synthetic construct
  source 1..20: mol_type = other DNA
gaggtgggtagcggttgcct

SEQ ID NO: 351 - DNA, 20 bp, synthetic construct
  source 1..20: mol_type = other DNA
gcttactcggcttgttccac

SEQ ID NO: 352 - DNA, 20 bp, synthetic construct
  source 1..20: mol_type = other DNA
tggtttttggcttactcggc

SEQ ID NO: 353 - DNA, 20 bp, synthetic construct
  source 1..20: mol_type = other DNA
tcccagcatgtagccgccaa

SEQ ID NO: 354 - DNA, 20 bp, synthetic construct
  source 1..20: mol_type = other DNA
tgccgaaatgtatgatgggc

SEQ ID NO: 355 - DNA, 20 bp, synthetic construct
  source 1..20: mol_type = other DNA
tcacgatagtaacggtcctc

SEQ ID NO: 356 - DNA, 20 bp, synthetic construct
  source 1..20: mol_type = other DNA
gggtaacggtgcatgttttc

SEQ ID NO: 357 - DNA, 20 bp, synthetic construct
  source 1..20: mol_type = other DNA
atccatgggcctgtagtaca

SEQ ID NO: 358 - DNA, 20 bp, synthetic construct
  source 1..20: mol_type = other DNA
tgaccgtgtgctgcttgatt

SEQ ID NO: 359 - DNA, 20 bp, synthetic construct
  source 1..20: mol_type = other DNA
tggttgtggtgaccgtgtgc

SEQ ID NO: 360 - DNA, 20 bp, synthetic construct
  source 1..20: mol_type = other DNA
tctcggtgaagttctccccc

SEQ ID NO: 361 - DNA, 20 bp, synthetic construct
  source 1..20: mol_type = other DNA
ctcaaccacgcgctccatca

SEQ ID NO: 362 - DNA, 20 bp, synthetic construct
  source 1..20: mol_type = other DNA
gggtgatacacatctgctca

SEQ ID NO: 363 - DNA, 20 bp, synthetic construct
  source 1..20: mol_type = other DNA
aagaggaccatgctcgatcc

SEQ ID NO: 364 - DNA, 20 bp, synthetic construct
  source 1..20: mol_type = other DNA
gtggataccgcctccctcaa

SEQ ID NO: 365 - DNA, 20 bp, synthetic construct
  source 1..20: mol_type = other DNA
ggtattgattagcctatccg

SEQ ID NO: 366 - DNA, 20 bp, synthetic construct
  source 1..20: mol_type = other DNA
tcagtgccaagggtattgat

SEQ ID NO: 367 - DNA, 20 bp, synthetic construct
  source 1..20: mol_type = other DNA
ctggcattagcaacggctca

SEQ ID NO: 368 - DNA, 20 bp, synthetic construct
  source 1..20: mol_type = other DNA
gctgttatacttttactggc

SEQ ID NO: 369 - DNA, 20 bp, synthetic construct
  source 1..20: mol_type = other DNA
agtatactgagctctagctg

SEQ ID NO: 370 - DNA, 20 bp, synthetic construct
  source 1..20: mol_type = other DNA
tggcagaaatgttgtcgggt

SEQ ID NO: 371 - DNA, 20 bp, synthetic construct
  source 1..20: mol_type = other DNA
agagctcatgctccagcggg

SEQ ID NO: 372 - DNA, 20 bp, synthetic construct
  source 1..20: mol_type = other DNA
aacatcaccccagttctcgg

SEQ ID NO: 373 - DNA, 20 bp, synthetic construct
  source 1..20: mol_type = other DNA
ctaaaatgggaggttgcctc

SEQ ID NO: 374 - DNA, 20 bp, synthetic construct
  source 1..20: mol_type = other DNA
gctgccttaattacctatag

SEQ ID NO: 375 - DNA, 20 bp, synthetic construct
  source 1..20: mol_type = other DNA
tgtaagcctaaggaccacgc

SEQ ID NO: 376 - DNA, 20 bp, synthetic construct
  source 1..20: mol_type = other DNA
acctgttaatggtgtccact

SEQ ID NO: 377 - DNA, 20 bp, synthetic construct
  source 1..20: mol_type = other DNA
cccttgcgcctgggacccga

SEQ ID NO: 378 - DNA, 20 bp, synthetic construct
  source 1..20: mol_type = other DNA
gcggagaccagcgcagccgg

SEQ ID NO: 379 - DNA, 20 bp, synthetic construct
  source 1..20: mol_type = other DNA
cgcctcacccgagcggagac

SEQ ID NO: 380 - DNA, 20 bp, synthetic construct
  source 1..20: mol_type = other DNA
gcgaagccaagccgcctcac

SEQ ID NO: 381 - DNA, 20 bp, synthetic construct
  source 1..20: mol_type = other DNA
cccgctgggccggacccgcg

SEQ ID NO: 382 - DNA, 20 bp, synthetic construct
  source 1..20: mol_type = other DNA
gccagcgatcgcccgctggg

SEQ ID NO: 383 - DNA, 20 bp, synthetic construct
  source 1..20: mol_type = other DNA
ccctgcggagcccgctggcg

SEQ ID NO: 384 - DNA, 20 bp, synthetic construct
  source 1..20: mol_type = other DNA
aagcaccctctgggcatcgc

SEQ ID NO: 385 - DNA, 20 bp, synthetic construct
  source 1..20: mol_type = other DNA
cgaggctcccggaactcccc

SEQ ID NO: 386 - DNA, 20 bp, synthetic construct
  source 1..20: mol_type = other DNA
gcccccctcggagaagctca

SEQ ID NO: 387 - DNA, 20 bp, synthetic construct
  source 1..20: mol_type = other DNA
ggccgcttctccaggcggtg

SEQ ID NO: 388 - DNA, 20 bp, synthetic construct
  source 1..20: mol_type = other DNA
atccgaggctggttgttcct

SEQ ID NO: 389 - DNA, 20 bp, synthetic construct
  source 1..20: mol_type = other DNA
cggagagctgtggctctgcg

SEQ ID NO: 390 - DNA, 20 bp, synthetic construct
  source 1..20: mol_type = other DNA
ggcaaccttccagcaagggt

SEQ ID NO: 391 - DNA, 20 bp, synthetic construct
  source 1..20: mol_type = other DNA
ctactgccctggtgttatac

SEQ ID NO: 392 - DNA, 20 bp, synthetic construct
  source 1..20: mol_type = other DNA
atgcacccgagtggcctctg

SEQ ID NO: 393 - DNA, 20 bp, synthetic construct
  source 1..20: mol_type = other DNA
ggtttggctagttggttgac

SEQ ID NO: 394 - DNA, 20 bp, synthetic construct
  source 1..20: mol_type = other DNA
tctcagggaattggcacccg

SEQ ID NO: 395 - DNA, 20 bp, synthetic construct
  source 1..20: mol_type = other DNA
accccataatgtcccttgtc

SEQ ID NO: 396 - DNA, 20 bp, synthetic construct
  source 1..20: mol_type = other DNA
ggcactaaagccttctagcc

SEQ ID NO: 397 - DNA, 20 bp, synthetic construct
  source 1..20: mol_type = other DNA
aagggtgcacttgacctgcc

SEQ ID NO: 398 - DNA, 20 bp, synthetic construct
  source 1..20: mol_type = other DNA
gcattcccattaatgtggtg

SEQ ID NO: 399 - DNA, 20 bp, synthetic construct
  source 1..20: mol_type = other DNA
gtcttcacctgagatgtagt

SEQ ID NO: 400 - DNA, 20 bp, synthetic construct
  source 1..20: mol_type = other DNA
ggaggagtgagagttgcccg

SEQ ID NO: 401 - DNA, 20 bp, synthetic construct
  source 1..20: mol_type = other DNA
gatacttagcttggtgggct

SEQ ID NO: 402 - DNA, 20 bp, synthetic construct
  source 1..20: mol_type = other DNA
gcttatcaggatagcacaaa

SEQ ID NO: 403 - DNA, 20 bp, synthetic construct
  source 1..20: mol_type = other DNA
tgggactgaaggtcagccta

SEQ ID NO: 404 - DNA, 20 bp, synthetic construct
  source 1..20: mol_type = other DNA
gcctagtcctctggcatatt

SEQ ID NO: 405 - DNA, 20 bp, synthetic construct
  source 1..20: mol_type = other DNA
agtcaagtagtggcctagtc

SEQ ID NO: 406 - DNA, 20 bp, synthetic construct
  source 1..20: mol_type = other DNA
ggaatgacactgagtcgggc

SEQ ID NO: 407 - DNA, 20 bp, synthetic construct
  source 1..20: mol_type = other DNA
cccatgtaacctggttcagg

SEQ ID NO: 408 - DNA, 20 bp, synthetic construct
  source 1..20: mol_type = other DNA
tcttaatatgcgggtcacat

SEQ ID NO: 409 - DNA, 20 bp, synthetic construct
  source 1..20: mol_type = other DNA
atcttattcggtgcttccat

SEQ ID NO: 410 - DNA, 20 bp, synthetic construct
  source 1..20: mol_type = other DNA
gcatacattggatctatcag

SEQ ID NO: 411 - DNA, 20 bp, synthetic construct
  source 1..20: mol_type = other DNA
ggtcatgccagttagggttt

SEQ ID NO: 412 - DNA, 20 bp, synthetic construct
  source 1..20: mol_type = other DNA
ttaccctgggcacttagctc

SEQ ID NO: 413 - DNA, 20 bp, synthetic construct
  source 1..20: mol_type = other DNA
cgggtgccatcgctccctga

SEQ ID NO: 414 - DNA, 20 bp, synthetic construct
  source 1..20: mol_type = other DNA
gataccgcctgcgggtgcca

SEQ ID NO: 415 - DNA, 20 bp, synthetic construct
  source 1..20: mol_type = other DNA
gcatcagttgataccgcctg

SEQ ID NO: 416 - DNA, 20 bp, synthetic construct
  source 1..20: mol_type = other DNA
aacgagttgagattcgcttg

SEQ ID NO: 417 - DNA, 20 bp, synthetic construct
  source 1..20: mol_type = other DNA
ggcggccggccgaggtttaa

SEQ ID NO: 418 - DNA, 20 bp, synthetic construct
  source 1..20: mol_type = other DNA
ccggcgcacactctgtgccc

SEQ ID NO: 419 - DNA, 20 bp, synthetic construct
  source 1..20: mol_type = other DNA
caattgccgcgcggcccggc

SEQ ID NO: 420 - DNA, 20 bp, synthetic construct
  source 1..20: mol_type = other DNA
cgctcgcgggcggaggtcgg

SEQ ID NO: 421 - DNA, 20 bp, synthetic construct
  source 1..20: mol_type = other DNA
gcgactggctcggaggacag

SEQ ID NO: 422 - DNA, 20 bp, synthetic construct
  source 1..20: mol_type = other DNA
cgccgcggctgtcagcgact

SEQ ID NO: 423 - DNA, 20 bp, synthetic construct
  source 1..20: mol_type = other DNA
aggttcgccataatgactgc

SEQ ID NO: 424 - DNA, 20 bp, synthetic construct
  source 1..20: mol_type = other DNA
gcgcttcttgcagaggccca

SEQ ID NO: 425 - DNA, 20 bp, synthetic construct
  source 1..20: mol_type = other DNA
cccgggtatcggctgccccc

SEQ ID NO: 426 - DNA, 20 bp, synthetic construct
  source 1..20: mol_type = other DNA
gggtagcggttgcctccagg

SEQ ID NO: 427 - DNA, 20 bp, synthetic construct
  source 1..20: mol_type = other DNA
ccctgaggtgggtagcggtt

SEQ ID NO: 428 - DNA, 20 bp, synthetic construct
  source 1..20: mol_type = other DNA
ggcttactcggcttgttcca

SEQ ID NO: 429 - DNA, 20 bp, synthetic construct
  source 1..20: mol_type = other DNA
atgtagccgccaaggccccc

SEQ ID NO: 430 - DNA, 20 bp, synthetic construct
  source 1..20: mol_type = other DNA
cttcccagcatgtagccgcc

SEQ ID NO: 431 - DNA, 20 bp, synthetic construct
  source 1..20: mol_type = other DNA
tcctcatagtcactgccgaa

SEQ ID NO: 432 - DNA, 20 bp, synthetic construct
  source 1..20: mol_type = other DNA
ttcacgatagtaacggtcct

SEQ ID NO: 433 - DNA, 20 bp, synthetic construct
  source 1..20: mol_type = other DNA
ctgtagtacacttggttggg

SEQ ID NO: 434 - DNA, 20 bp, synthetic construct
  source 1..20: mol_type = other DNA
tactcatccatgggcctgta

SEQ ID NO: 435 - DNA, 20 bp, synthetic construct
  source 1..20: mol_type = other DNA
ggtgaccgtgtgctgcttga

SEQ ID NO: 436 - DNA, 20 bp, synthetic construct
  source 1..20: mol_type = other DNA
ctcccccttggtggttgtgg

SEQ ID NO: 437 - DNA, 20 bp, synthetic construct
  source 1..20: mol_type = other DNA
ggtctcggtgaagttctccc

SEQ ID NO: 438 - DNA, 20 bp, synthetic construct
  source 1..20: mol_type = other DNA
tgctcaaccacgcgctccat

SEQ ID NO: 439 - DNA, 20 bp, synthetic construct
  source 1..20: mol_type = other DNA
ggtaataggcctgagattcc

SEQ ID NO: 440 - DNA, 20 bp, synthetic construct
  source 1..20: mol_type = other DNA
ggagaagaggaccatgctcg

SEQ ID NO: 441 - DNA, 20 bp, synthetic construct
  source 1..20: mol_type = other DNA
ggtggataccgcctccctca

SEQ ID NO: 442 - DNA, 20 bp, synthetic construct
  source 1..20: mol_type = other DNA
gggtattgattagcctatcc

SEQ ID NO: 443 - DNA, 20 bp, synthetic construct
  source 1..20: mol_type = other DNA
gcaacggctcatgatgaact

SEQ ID NO: 444 - DNA, 20 bp, synthetic construct
  source 1..20: mol_type = other DNA
cctggcattagcaacggctc

SEQ ID NO: 445 - DNA, 20 bp, synthetic construct
  source 1..20: mol_type = other DNA
agtccagattaaccaatggt

SEQ ID NO: 446 - DNA, 20 bp, synthetic construct
  source 1..20: mol_type = other DNA
tagtatactgagctctagct

SEQ ID NO: 447 - DNA, 20 bp, synthetic construct
  source 1..20: mol_type = other DNA
cctggcagaaatgttgtcgg

SEQ ID NO: 448 - DNA, 20 bp, synthetic construct
  source 1..20: mol_type = other DNA
cggtacacacagagctcatg

SEQ ID NO: 449 - DNA, 20 bp, synthetic construct
  source 1..20: mol_type = other DNA
gtgtagcccatactgtgaaa

SEQ ID NO: 450 - DNA, 20 bp, synthetic construct
  source 1..20: mol_type = other DNA
agggtcctttaaacatctaa

SEQ ID NO: 451 - DNA, 20 bp, synthetic construct
  source 1..20: mol_type = other DNA
atcctctatgatgatggtgc

SEQ ID NO: 452 - DNA, 20 bp, synthetic construct
  source 1..20: mol_type = other DNA
ttgtaagcctaaggaccacg

SEQ ID NO: 453 - DNA, 20 bp, synthetic construct
  source 1..20: mol_type = other DNA
aagacctgttaatggtgtcc

SEQ ID NO: 454 - DNA, 20 bp, synthetic construct
  source 1..20: mol_type = other DNA
ggcacccttgcgcctgggac

SEQ ID NO: 455 - DNA, 20 bp, synthetic construct
  source 1..20: mol_type = other DNA
agcggagaccagcgcagccg

SEQ ID NO: 456 - DNA, 20 bp, synthetic construct
  source 1..20: mol_type = other DNA
ccgcctcacccgagcggaga

SEQ ID NO: 457 - DNA, 20 bp, synthetic construct
  source 1..20: mol_type = other DNA
aagcgaagccaagccgcctc

SEQ ID NO: 458 - DNA, 20 bp, synthetic construct
  source 1..20: mol_type = other DNA
tcgcccgctgggccggaccc

SEQ ID NO: 459 - DNA, 20 bp, synthetic construct
  source 1..20: mol_type = other DNA
tcccggagttccctgggcgc

SEQ ID NO: 460 - DNA, 20 bp, synthetic construct
  source 1..20: mol_type = other DNA
gcgccctgcggagcccgctg

SEQ ID NO: 461 - DNA, 20 bp, synthetic construct
  source 1..20: mol_type = other DNA
cggaactcccccggcgggcg

SEQ ID NO: 462 - DNA, 20 bp, synthetic construct
  source 1..20: mol_type = other DNA
ccgaggctcccggaactccc

SEQ ID NO: 463 - DNA, 20 bp, synthetic construct
  source 1..20: mol_type = other DNA
agcccccctcggagaagctc

SEQ ID NO: 464 - DNA, 20 bp, synthetic construct
  source 1..20: mol_type = other DNA
tgggccgcttctccaggcgg

SEQ ID NO: 465 - DNA, 20 bp, synthetic construct
  source 1..20: mol_type = other DNA
ggagaccggtgacccaaggg

SEQ ID NO: 466 - DNA, 20 bp, synthetic construct
  source 1..20: mol_type = other DNA
cgcggccatgaagatcctca

SEQ ID NO: 467 - DNA, 20 bp, synthetic construct
  source 1..20: mol_type = other DNA
gttttgggcaaccttccagc

SEQ ID NO: 468 - DNA, 20 bp, synthetic construct
  source 1..20: mol_type = other DNA
gtgcagttaataacccactt

SEQ ID NO: 469 - DNA, 20 bp, synthetic construct
  source 1..20: mol_type = other DNA
acagatgcacccgagtggcc

SEQ ID NO: 470 - DNA, 20 bp, synthetic construct
  source 1..20: mol_type = other DNA
gtggatatagttgccttgga

SEQ ID NO: 471 - DNA, 20 bp, synthetic construct
  source 1..20: mol_type = other DNA
ttctcagggaattggcaccc

SEQ ID NO: 472 - DNA, 20 bp, synthetic construct
  source 1..20: mol_type = other DNA
cgaccttcaccccataatgt

SEQ ID NO: 473 - DNA, 20 bp, synthetic construct
  source 1..20: mol_type = other DNA
aggcactaaagccttctagc

SEQ ID NO: 474 - DNA, 20 bp, synthetic construct
  source 1..20: mol_type = other DNA
gacttacacttcacttagac

SEQ ID NO: 475 - DNA, 20 bp, synthetic construct
  source 1..20: mol_type = other DNA
gctctattaataggttagga

SEQ ID NO: 476 - DNA, 20 bp, synthetic construct
  source 1..20: mol_type = other DNA
ggacaaactggtggagggtc

SEQ ID NO: 477 - DNA, 20 bp, synthetic construct
  source 1..20: mol_type = other DNA
ggagtccatgcagctagcag

SEQ ID NO: 478 - DNA, 20 bp, synthetic construct
  source 1..20: mol_type = other DNA
ggtgacccacaacacattat

SEQ ID NO: 479 - DNA, 20 bp, synthetic construct
  source 1..20: mol_type = other DNA
cgcttatcaggatagcacaa

SEQ ID NO: 480 - DNA, 20 bp, synthetic construct
  source 1..20: mol_type = other DNA
gcaattagtgtgatcatgca

SEQ ID NO: 481 - DNA, 20 bp, synthetic construct
  source 1..20: mol_type = other DNA
gtggcctagtcctctggcat

SEQ ID NO: 482 - DNA, 20 bp, synthetic construct
  source 1..20: mol_type = other DNA
gtcaccagtcaagtagtggc

SEQ ID NO: 483 - DNA, 20 bp, synthetic construct
  source 1..20: mol_type = other DNA
agggaatgacactgagtcgg

SEQ ID NO: 484 - DNA, 20 bp, synthetic construct
  source 1..20: mol_type = other DNA
gggccccatgtaacctggtt

SEQ ID NO: 485 - DNA, 20 bp, synthetic construct
  source 1..20: mol_type = other DNA
ctcttaatatgcgggtcaca

SEQ ID NO: 486 - DNA, 20 bp, synthetic construct
  source 1..20: mol_type = other DNA
ccatcttattcggtgcttcc

SEQ ID NO: 487 - DNA, 20 bp, synthetic construct
  source 1..20: mol_type = other DNA
ccagcatacattggatctat

SEQ ID NO: 488 - DNA, 20 bp, synthetic construct
  source 1..20: mol_type = other DNA
gtactcaggtcatgccagtt

SEQ ID NO: 489 - DNA, 20 bp, synthetic construct
  source 1..20: mol_type = other DNA
gagtcccatatttatgttga

SEQ ID NO: 490 - DNA, 20 bp, synthetic construct
  source 1..20: mol_type = other DNA
tggaaattcggcccaaagct

SEQ ID NO: 491 - DNA, 20 bp, synthetic construct
  source 1..20: mol_type = other DNA
gtggctcattgactgtaaaa

SEQ ID NO: 492 - DNA, 20 bp, synthetic construct
  source 1..20: mol_type = other DNA
caccggaaaaaacgagttga

SEQ ID NO: 493 - DNA, 20 bp, synthetic construct
  source 1..20: mol_type = other DNA
ccccagccaccaccatgagg

SEQ ID NO: 494 - DNA, 20 bp, synthetic construct
  source 1..20: mol_type = other DNA
tgcttcatgttggtttttgg

SEQ ID NO: 495 - DNA, 20 bp, synthetic construct
  source 1..20: mol_type = other DNA
gaagaccttcctcatcccac

SEQ ID NO: 496 - DNA, 20 bp, synthetic construct
  source 1..20: mol_type = other DNA
ttgaccagcatctcaggtct

SEQ ID NO: 497 - DNA, 20 bp, synthetic construct
  source 1..20: mol_type = other DNA
ctgttctgagatttgtttta

SEQ ID NO: 498 - DNA, 20 bp, synthetic construct
  source 1..20: mol_type = other DNA
atcatgtggcctcctaacaa

SEQ ID NO: 499 - DNA, 20 bp, synthetic construct
  source 1..20: mol_type = other DNA
actcttgttgaacagctgct

SEQ ID NO: 500 - DNA, 20 bp, synthetic construct
  source 1..20: mol_type = other DNA
gccagaggttcagtgttgtg

SEQ ID NO: 501 - DNA, 20 bp, synthetic construct
  source 1..20: mol_type = other DNA
tttcatatatgttacagtta

SEQ ID NO: 502 - DNA, 20 bp, synthetic construct
  source 1..20: mol_type = other DNA
ccattcccaaacatttgatt

SEQ ID NO: 503 - DNA, 20 bp, synthetic construct
  source 1..20: mol_type = other DNA
ccttaattacctatagttta

SEQ ID NO: 504 - DNA, 20 bp, synthetic construct
  source 1..20: mol_type = other DNA
ccttcagtgtctagaaggca

SEQ ID NO: 505 - DNA, 20 bp, synthetic construct
  source 1..20: mol_type = other DNA
tgtatgtcaaaatcattctg

SEQ ID NO: 506 - DNA, 20 bp, synthetic construct
  source 1..20: mol_type = other DNA
ctatgatgatggtgctttca

SEQ ID NO: 507 - DNA, 20 bp, synthetic construct
  source 1..20: mol_type = other DNA
acactgaccattttttaatt

SEQ ID NO: 508 - DNA, 20 bp, synthetic construct
  source 1..20: mol_type = other DNA
aagaaatgcaagcagttctt

SEQ ID NO: 509 - DNA, 20 bp, synthetic construct
  source 1..20: mol_type = other DNA
caattacagaaactatgaac

SEQ ID NO: 510 - DNA, 20 bp, synthetic construct
  source 1..20: mol_type = other DNA
agattgtctccctattcttt

SEQ ID NO: 511 - DNA, 20 bp, synthetic construct
  source 1..20: mol_type = other DNA
tatttctgtcatctccaacc

SEQ ID NO: 512 - DNA, 20 bp, synthetic construct
  source 1..20: mol_type = other DNA
tctttttccacttcaaatca

SEQ ID NO: 513 - DNA, 20 bp, synthetic construct
  source 1..20: mol_type = other DNA
aacaattcagggaataattt

SEQ ID NO: 514 - DNA, 20 bp, synthetic construct
  source 1..20: mol_type = other DNA
gcagaaaagtaatacatatc

SEQ ID NO: 515 - DNA, 20 bp, synthetic construct
  source 1..20: mol_type = other DNA
actgctctaaacaaaactcc

SEQ ID NO: 516 - DNA, 20 bp, synthetic construct
  source 1..20: mol_type = other DNA
catattaagtattcagtacc

SEQ ID NO: 517 - DNA, 20 bp, synthetic construct
  source 1..20: mol_type = other DNA
acaagaacatgcaaagttac

SEQ ID NO: 518 - DNA, 20 bp, synthetic construct
  source 1..20: mol_type = other DNA
catgaagatcctcatcatta

SEQ ID NO: 519 - DNA, 20 bp, synthetic construct
  source 1..20: mol_type = other DNA
ctaccaggagttttccctaa

SEQ ID NO: 520 - DNA, 20 bp, synthetic construct
  source 1..20: mol_type = other DNA
ttttgataattatatttgta

SEQ ID NO: 521 - DNA, 20 bp, synthetic construct
  source 1..20: mol_type = other DNA
ccagaagtttaacatattta

SEQ ID NO: 522 - DNA, 20 bp, synthetic construct
  source 1..20: mol_type = other DNA
aaaattgctcctttccactg

SEQ ID NO: 523 - DNA, 20 bp, synthetic construct
  source 1..20: mol_type = other DNA
tactggttagctttttttca

SEQ ID NO: 524 - DNA, 20 bp, synthetic construct
  source 1..20: mol_type = other DNA
tggaagacttgtgttagata

SEQ ID NO: 525 - DNA, 20 bp, synthetic construct
  source 1..20: mol_type = other DNA
tttgccatttatctattata

SEQ ID NO: 526 - DNA, 20 bp, synthetic construct
  source 1..20: mol_type = other DNA
caaacatgctctaatttgca

SEQ ID NO: 527 - DNA, 20 bp, synthetic construct
  source 1..20: mol_type = other DNA
tgcagaaccatctttgtgac

SEQ ID NO: 528 - DNA, 20 bp, synthetic construct
  source 1..20: mol_type = other DNA
caataactcatacatacaga

SEQ ID NO: 529 - DNA, 20 bp, synthetic construct
  source 1..20: mol_type = other DNA
gcaggtaagttctcaggagt

SEQ ID NO: 530 - DNA, 20 bp, synthetic construct
  source 1..20: mol_type = other DNA
tgtcataattttcttagcta

SEQ ID NO: 531 - DNA, 20 bp, synthetic construct
  source 1..20: mol_type = other DNA
ggctccaaaatcatgatttt

SEQ ID NO: 532 - DNA, 20 bp, synthetic construct
  source 1..20: mol_type = other DNA
taataacccacttttttact

SEQ ID NO: 533 - DNA, 20 bp, synthetic construct
  source 1..20: mol_type = other DNA
accaaaggaaaattaagatc

SEQ ID NO: 534 - DNA, 20 bp, synthetic construct
  source 1..20: mol_type = other DNA
gctaaaaatcttttattcta

SEQ ID NO: 535 - DNA, 20 bp, synthetic construct
  source 1..20: mol_type = other DNA
tgaccctcattttctgtgac

SEQ ID NO: 536 - DNA, 20 bp, synthetic construct
  source 1..20: mol_type = other DNA
taattctaaaaatctgtggc

SEQ ID NO: 537 - DNA, 20 bp, synthetic construct
  source 1..20: mol_type = other DNA
cagaaacttctgttatgtta

SEQ ID NO: 538 - DNA, 20 bp, synthetic construct
  source 1..20: mol_type = other DNA
tgggttagatacagacatgt

SEQ ID NO: 539 - DNA, 20 bp, synthetic construct
  source 1..20: mol_type = other DNA
aggattacctcccttaaagt

SEQ ID NO: 540 - DNA, 20 bp, synthetic construct
  source 1..20: mol_type = other DNA
agtaaattcccttgttatat

SEQ ID NO: 541 - DNA, 20 bp, synthetic construct
  source 1..20: mol_type = other DNA
cattatgaaattatactcaa

SEQ ID NO: 542 - DNA, 20 bp, synthetic construct
  source 1..20: mol_type = other DNA
ctatctttctatttgtgtct

SEQ ID NO: 543 - DNA, 20 bp, synthetic construct
  source 1..20: mol_type = other DNA
ttagatctgaaacgagacaa

SEQ ID NO: 544 - DNA, 20 bp, synthetic construct
  source 1..20: mol_type = other DNA
gaagcaaattcaacagctca

SEQ ID NO: 545 - DNA, 20 bp, synthetic construct
  source 1..20: mol_type = other DNA
catcagacttacacttcact

SEQ ID NO: 546 - DNA, 20 bp, synthetic construct
  source 1..20: mol_type = other DNA
ggtggtagtttttcaaatca

SEQ ID NO: 547 - DNA, 20 bp, synthetic construct
  source 1..20: mol_type = other DNA
ggatagtctctttccatcat

SEQ ID NO: 548 - DNA, 20 bp, synthetic construct
  source 1..20: mol_type = other DNA
agggtcaaaattcaatgcta

SEQ ID NO: 549 - DNA, 20 bp, synthetic construct
  source 1..20: mol_type = other DNA
acacagttttgaataagata

SEQ ID NO: 550 - DNA, 20 bp, synthetic construct
  source 1..20: mol_type = other DNA
cattattgtgccaccaagcc

SEQ ID NO: 551 - DNA, 20 bp, synthetic construct
  source 1..20: mol_type = other DNA
ttctttgcagggatatgcaa

SEQ ID NO: 552 - DNA, 20 bp, synthetic construct
  source 1..20: mol_type = other DNA
atgcacatagaaaatccaac

SEQ ID NO: 553 - DNA, 20 bp, synthetic construct
  source 1..20: mol_type = other DNA
ctggcatatttcaagatatc

SEQ ID NO: 554 - DNA, 20 bp, synthetic construct
  source 1..20: mol_type = other DNA
tagtatttttgacaatggcc

SEQ ID NO: 555 - DNA, 20 bp, synthetic construct
  source 1..20: mol_type = other DNA
tgcttattattcatgttctc

SEQ ID NO: 556 - DNA, 20 bp, synthetic construct
  source 1..20: mol_type = other DNA
atgccacttcccttgtccct

SEQ ID NO: 557 - DNA, 20 bp, synthetic construct
  source 1..20: mol_type = other DNA
gaattttctctcccagcata

SEQ ID NO: 558 - DNA, 20 bp, synthetic construct
  source 1..20: mol_type = other DNA
ttgaaagttacaagcagagt

SEQ ID NO: 559 - DNA, 20 bp, synthetic construct
  source 1..20: mol_type = other DNA
aactggataatattcataaa

SEQ ID NO: 560 - DNA, 20 bp, synthetic construct
  source 1..20: mol_type = other DNA
cctttatcacccaattagct

SEQ ID NO: 561 - DNA, 20 bp, synthetic construct
  source 1..20: mol_type = other DNA
ttttagtacatttaatgaaa

SEQ ID NO: 562 - DNA, 20 bp, synthetic construct
  source 1..20: mol_type = other DNA
tataatggcatatactggaa

SEQ ID NO: 563 - DNA, 20 bp, synthetic construct
  source 1..20: mol_type = other DNA
aaacagtacctgctgtaccc

SEQ ID NO: 564 - DNA, 20 bp, synthetic construct
  source 1..20: mol_type = other DNA
aatctcttttcaaattaaag

SEQ ID NO: 565 - DNA, 20 bp, synthetic construct
  source 1..20: mol_type = other DNA
cctttggagaatgtacattc

SEQ ID NO: 566 - DNA, 20 bp, synthetic construct
  source 1..20: mol_type = other DNA
ttctaatttttgtaccaaaa

SEQ ID NO: 567 - DNA, 20 bp, synthetic construct
  source 1..20: mol_type = other DNA
ttggaaattcggcccaaagc

SEQ ID NO: 568 - DNA, 20 bp, synthetic construct
  source 1..20: mol_type = other DNA
cgtggctcattgactgtaaa

SEQ ID NO: 569 - DNA, 20 bp, synthetic construct
  source 1..20: mol_type = other DNA
gtcaccggaaaaaacgagtt

SEQ ID NO: 570 - DNA, 20 bp, synthetic construct
  source 1..20: mol_type = other DNA
cccccagccaccaccatgag

SEQ ID NO: 571 - DNA, 20 bp, synthetic construct
  source 1..20: mol_type = other DNA
ccatgtgcttcatgttggtt

SEQ ID NO: 572 - DNA, 20 bp, synthetic construct
  source 1..20: mol_type = other DNA
ggaagaccttcctcatccca

SEQ ID NO: 573 - DNA, 20 bp, synthetic construct
  source 1..20: mol_type = other DNA
cttgaccagcatctcaggtc

SEQ ID NO: 574 - DNA, 20 bp, synthetic construct
  source 1..20: mol_type = other DNA
ggcaaaggtatttcagactg

SEQ ID NO: 575 - DNA, 20 bp, synthetic construct
  source 1..20: mol_type = other DNA
tatcatgtggcctcctaaca

SEQ ID NO: 576 - DNA, 20 bp, synthetic construct
  source 1..20: mol_type = other DNA
tactcttgttgaacagctgc

SEQ ID NO: 577 - DNA, 20 bp, synthetic construct
  source 1..20: mol_type = other DNA
tgaatatgtcctctagccag

SEQ ID NO: 578 - DNA, 20 bp, synthetic construct
  source 1..20: mol_type = other DNA
ctttcatatatgttacagtt

SEQ ID NO: 579 - DNA, 20 bp, synthetic construct
  source 1..20: mol_type = other DNA
accattcccaaacatttgat

SEQ ID NO: 580 - DNA, 20 bp, synthetic construct
  source 1..20: mol_type = other DNA
gccttaattacctatagttt

SEQ ID NO: 581 - DNA, 20 bp, synthetic construct
  source 1..20: mol_type = other DNA
gccttcagtgtctagaaggc

SEQ ID NO: 582 - DNA, 20 bp, synthetic construct
  source 1..20: mol_type = other DNA
ctgtatgtcaaaatcattct

SEQ ID NO: 583 - DNA, 20 bp, synthetic construct
  source 1..20: mol_type = other DNA
ctctatgatgatggtgcttt

SEQ ID NO: 584 - DNA, 20 bp, synthetic construct
  source 1..20: mol_type = other DNA
gcacactgaccattttttaa

SEQ ID NO: 585 - DNA, 20 bp, synthetic construct
  source 1..20: mol_type = other DNA
ataaagaaatgcaagcagtt

SEQ ID NO: 586 - DNA, 20 bp, synthetic construct
  source 1..20: mol_type = other DNA
ccaattacagaaactatgaa

SEQ ID NO: 587 - DNA, 20 bp, synthetic construct
  source 1..20: mol_type = other DNA
tagattgtctccctattctt

SEQ ID NO: 588 - DNA, 20 bp, synthetic construct
  source 1..20: mol_type = other DNA
atatttctgtcatctccaac

SEQ ID NO: 589 - DNA, 20 bp, synthetic construct
  source 1..20: mol_type = other DNA
aatttctttttccacttcaa

SEQ ID NO: 590 - DNA, 20 bp, synthetic construct
  source 1..20: mol_type = other DNA
tatcaaacaattcagggaat

SEQ ID NO: 591 - DNA, 20 bp, synthetic construct
  source 1..20: mol_type = other DNA
cattgcagaaaagtaataca

SEQ ID NO: 592 - DNA, 20 bp, synthetic construct
  source 1..20: mol_type = other DNA
taactgctctaaacaaaact

SEQ ID NO: 593 - DNA, 20 bp, synthetic construct
  source 1..20: mol_type = other DNA
gtttcccacatattaagtat

SEQ ID NO: 594 - DNA, 20 bp, synthetic construct
  source 1..20: mol_type = other DNA
aacaaaacaagaacatgcaa

SEQ ID NO: 595 - DNA, 20 bp, synthetic construct
  source 1..20: mol_type = other DNA
ccatgaagatcctcatcatt

SEQ ID NO: 596 - DNA, 20 bp, synthetic construct
  source 1..20: mol_type = other DNA
tctaccaggagttttcccta

SEQ ID NO: 597 - DNA, 20 bp, synthetic construct
  source 1..20: mol_type = other DNA
cctatgtttttgataattat

SEQ ID NO: 598 - DNA, 20 bp, synthetic construct
  source 1..20: mol_type = other DNA
tccagaagtttaacatattt

SEQ ID NO: 599 - DNA, 20 bp, synthetic construct
  source 1..20: mol_type = other DNA
taaaattgctcctttccact

SEQ ID NO: 600 - DNA, 20 bp, synthetic construct
  source 1..20: mol_type = other DNA
gcttttccccttactggtta

SEQ ID NO: 601 - DNA, 20 bp, synthetic construct
  source 1..20: mol_type = other DNA
gtggaagacttgtgttagat

SEQ ID NO: 602 - DNA, 20 bp, synthetic construct
  source 1..20: mol_type = other DNA
attttgccatttatctatta

SEQ ID NO: 603 - DNA, 20 bp, synthetic construct
  source 1..20: mol_type = other DNA
tgataacccaaacatgctct

SEQ ID NO: 604 - DNA, 20 bp, synthetic construct
  source 1..20: mol_type = other DNA
ctgcagaaccatctttgtga

SEQ ID NO: 605 - DNA, 20 bp, synthetic construct
  source 1..20: mol_type = other DNA
cccaataactcatacataca

SEQ ID NO: 606 - DNA, 20 bp, synthetic construct
  source 1..20: mol_type = other DNA
ttgcaggtaagttctcagga

SEQ ID NO: 607 - DNA, 20 bp, synthetic construct
  source 1..20: mol_type = other DNA
tgtgtcataattttcttagc

SEQ ID NO: 608 - DNA, 20 bp, synthetic construct
  source 1..20: mol_type = other DNA
caggctccaaaatcatgatt

SEQ ID NO: 609 - DNA, 20 bp, synthetic construct
  source 1..20: mol_type = other DNA
gttaataacccactttttta

SEQ ID NO: 610 - DNA, 20 bp, synthetic construct
  source 1..20: mol_type = other DNA
gcaatatattcaccaaagga

SEQ ID NO: 611 - DNA, 20 bp, synthetic construct
  source 1..20: mol_type = other DNA
ggctaaaaatcttttattct

SEQ ID NO: 612 - DNA, 20 bp, synthetic construct
  source 1..20: mol_type = other DNA
cctgaccctcattttctgtg

SEQ ID NO: 613 - DNA, 20 bp, synthetic construct
  source 1..20: mol_type = other DNA
cataattctaaaaatctgtg

SEQ ID NO: 614 - DNA, 20 bp, synthetic construct
  source 1..20: mol_type = other DNA
gcagaaacttctgttatgtt

SEQ ID NO: 615 - DNA, 20 bp, synthetic construct
  source 1..20: mol_type = other DNA
tagccatcactgggttagat

SEQ ID NO: 616 - DNA, 20 bp, synthetic construct
  source 1..20: mol_type = other DNA
gaaggattacctcccttaaa

SEQ ID NO: 617 - DNA, 20 bp, synthetic construct
  source 1..20: mol_type = other DNA
gctaagtaaattcccttgtt

SEQ ID NO: 618 - DNA, 20 bp, synthetic construct
  source 1..20: mol_type = other DNA
acattatgaaattatactca

SEQ ID NO: 619 - DNA, 20 bp, synthetic construct
  source 1..20: mol_type = other DNA
gctatctttctatttgtgtc

SEQ ID NO: 620 - DNA, 20 bp, synthetic construct
  source 1..20: mol_type = other DNA
gagagcttttcctcttagat

SEQ ID NO: 621 - DNA, 20 bp, synthetic construct
  source 1..20: mol_type = other DNA
cgaagcaaattcaacagctc

SEQ ID NO: 622 - DNA, 20 bp, synthetic construct
  source 1..20: mol_type = other DNA
gcatcagacttacacttcac

SEQ ID NO: 623 - DNA, 20 bp, synthetic construct
  source 1..20: mol_type = other DNA
atgagctcaacagggtggta

SEQ ID NO: 624 - DNA, 20 bp, synthetic construct
  source 1..20: mol_type = other DNA
aggatagtctctttccatca

SEQ ID NO: 625 - DNA, 20 bp, synthetic construct
  source 1..20: mol_type = other DNA
gtagagataaacatttgggc

SEQ ID NO: 626 - DNA, 20 bp, synthetic construct
  source 1..20: mol_type = other DNA
gacacagttttgaataagat

SEQ ID NO: 627 - DNA, 20 bp, synthetic construct
  source 1..20: mol_type = other DNA
acaacacattattgtgccac

SEQ ID NO: 628 - DNA, 20 bp, synthetic construct
  source 1..20: mol_type = other DNA
tgctatcgaatactatgcag

SEQ ID NO: 629 - DNA, 20 bp, synthetic construct
  source 1..20: mol_type = other DNA
gtgtgatcatgcacatagaa

SEQ ID NO: 630 - DNA, 20 bp, synthetic construct
  source 1..20: mol_type = other DNA
ctctggcatatttcaagata

SEQ ID NO: 631 - DNA, 20 bp, synthetic construct
  source 1..20: mol_type = other DNA
ccatatttataaatttacaa

SEQ ID NO: 632 - DNA, 20 bp, synthetic construct
  source 1..20: mol_type = other DNA
gtgcttattattcatgttct

SEQ ID NO: 633 - DNA, 20 bp, synthetic construct
  source 1..20: mol_type = other DNA
tcttcaacagcctcccaacc

SEQ ID NO: 634 - DNA, 20 bp, synthetic construct
  source 1..20: mol_type = other DNA
tgaattttctctcccagcat

SEQ ID NO: 635 - DNA, 20 bp, synthetic construct
  source 1..20: mol_type = other DNA
atatatttgaaagttacaag

SEQ ID NO: 636 - DNA, 20 bp, synthetic construct
  source 1..20: mol_type = other DNA
gctaatgattaaactggata

SEQ ID NO: 637 - DNA, 20 bp, synthetic construct
  source 1..20: mol_type = other DNA
ttacctttatcacccaatta

SEQ ID NO: 638 - DNA, 20 bp, synthetic construct
  source 1..20: mol_type = other DNA
gtttttagtacatttaatga

SEQ ID NO: 639 - DNA, 20 bp, synthetic construct
  source 1..20: mol_type = other DNA
ctataatggcatatactgga

SEQ ID NO: 640 - DNA, 20 bp, synthetic construct
  source 1..20: mol_type = other DNA
taaacagtacctgctgtacc

SEQ ID NO: 641 - DNA, 20 bp, synthetic construct
  source 1..20: mol_type = other DNA
aaaatctcttttcaaattaa

SEQ ID NO: 642 - DNA, 20 bp, synthetic construct
  source 1..20: mol_type = other DNA
atttatgaccctttggagaa

SEQ ID NO: 643 - DNA, 20 bp, synthetic construct
  source 1..20: mol_type = other DNA
cttctaatttttgtaccaaa

SEQ ID NO: 644 - DNA, 20 bp, synthetic construct
  source 1..20: mol_type = other DNA
taattggaaattcggcccaa

SEQ ID NO: 645 - DNA, 20 bp, synthetic construct
  source 1..20: mol_type = other DNA
tgataccgcctgcgggtgcc

SEQ ID NO: 646 - DNA, 20 bp, synthetic construct
  source 1..20: mol_type = other DNA
agtcaccggaaaaaacgagt

SEQ ID NO: 647 - DNA, 20 bp, synthetic construct
  source 1..20: mol_type = other DNA
gcccccagccaccaccatga

SEQ ID NO: 648 - DNA, 20 bp, synthetic construct
  source 1..20: mol_type = other DNA
caaggccccccaccactgcc

SEQ ID NO: 649 - DNA, 20 bp, synthetic construct
  source 1..20: mol_type = other DNA
aggaagaccttcctcatccc

SEQ ID NO: 650 - DNA, 20 bp, synthetic construct
  source 1..20: mol_type = other DNA
catgatgaactcaatcaaag

SEQ ID NO: 651 - DNA, 20 bp, synthetic construct
  source 1..20: mol_type = other DNA
gtatccaggcaaaggtattt

SEQ ID NO: 652 - DNA, 20 bp, synthetic construct
  source 1..20: mol_type = other DNA
agtatcatgtggcctcctaa

SEQ ID NO: 653 - DNA, 20 bp, synthetic construct
  source 1..20: mol_type = other DNA
tttactcttgttgaacagct

SEQ ID NO: 654 - DNA, 20 bp, synthetic construct
  source 1..20: mol_type = other DNA
tgtgaatatgtcctctagcc

SEQ ID NO: 655 - DNA, 20 bp, synthetic construct
  source 1..20: mol_type = other DNA
cctttcatatatgttacagt

SEQ ID NO: 656 - DNA, 20 bp, synthetic construct
  source 1..20: mol_type = other DNA
caccattcccaaacatttga

SEQ ID NO: 657 - DNA, 20 bp, synthetic construct
  source 1..20: mol_type = other DNA
tgccttaattacctatagtt

SEQ ID NO: 658 - DNA, 20 bp, synthetic construct
  source 1..20: mol_type = other DNA
agatttgccttcagtgtcta

SEQ ID NO: 659 - DNA, 20 bp, synthetic construct
  source 1..20: mol_type = other DNA
cctgtatgtcaaaatcattc

SEQ ID NO: 660 - DNA, 20 bp, synthetic construct
  source 1..20: mol_type = other DNA
cctctatgatgatggtgctt

SEQ ID NO: 661 - DNA, 20 bp, synthetic construct
  source 1..20: mol_type = other DNA
tgcacactgaccatttttta

SEQ ID NO: 662 - DNA, 20 bp, synthetic construct
  source 1..20: mol_type = other DNA
tatgagacagaaataaagaa

SEQ ID NO: 663 - DNA, 20 bp, synthetic construct
  source 1..20: mol_type = other DNA
aaaagccaattacagaaact

SEQ ID NO: 664 - DNA, 20 bp, synthetic construct
  source 1..20: mol_type = other DNA
ttagattgtctccctattct

SEQ ID NO: 665 - DNA, 20 bp, synthetic construct
  source 1..20: mol_type = other DNA
catatttctgtcatctccaa

SEQ ID NO: 666 - DNA, 20 bp, synthetic construct
  source 1..20: mol_type = other DNA
gaatttctttttccacttca

SEQ ID NO: 667 - DNA, 20 bp, synthetic construct
  source 1..20: mol_type = other DNA
atatcaaacaattcagggaa

SEQ ID NO: 668 - DNA, 20 bp, synthetic construct
  source 1..20: mol_type = other DNA
gccaataataacattgcaga

SEQ ID NO: 669 - DNA, 20 bp, synthetic construct
  source 1..20: mol_type = other DNA
ttaactgctctaaacaaaac

SEQ ID NO: 670 - DNA, 20 bp, synthetic construct
  source 1..20: mol_type = other DNA
ggtttcccacatattaagta

SEQ ID NO: 671 - DNA, 20 bp, synthetic construct
  source 1..20: mol_type = other DNA
atataacaaaacaagaacat

SEQ ID NO: 672 - DNA, 20 bp, synthetic construct
  source 1..20: mol_type = other DNA
gccatgaagatcctcatcat

SEQ ID NO: 673 - DNA, 20 bp, synthetic construct
  source 1..20: mol_type = other DNA
tcctattctaccaggagttt

SEQ ID NO: 674 - DNA, 20 bp, synthetic construct
  source 1..20: mol_type = other DNA
tcctatgtttttgataatta

SEQ ID NO: 675 - DNA, 20 bp, synthetic construct
  source 1..20: mol_type = other DNA
tttccagaagtttaacatat

SEQ ID NO: 676 - DNA, 20 bp, synthetic construct
  source 1..20: mol_type = other DNA
gtaaaattgctcctttccac

SEQ ID NO: 677 - DNA, 20 bp, synthetic construct
  source 1..20: mol_type = other DNA
tgcttttccccttactggtt

SEQ ID NO: 678 - DNA, 20 bp, synthetic construct
  source 1..20: mol_type = other DNA
aatattttcctttcggtgtg

SEQ ID NO: 679 - DNA, 20 bp, synthetic construct
  source 1..20: mol_type = other DNA
cattttgccatttatctatt

SEQ ID NO: 680 - DNA, 20 bp, synthetic construct
  source 1..20: mol_type = other DNA
atgataacccaaacatgctc

SEQ ID NO: 681 - DNA, 20 bp, synthetic construct
  source 1..20: mol_type = other DNA
gactgcagaaccatctttgt

SEQ ID NO: 682 - DNA, 20 bp, synthetic construct
  source 1..20: mol_type = other DNA
ccccaataactcatacatac

SEQ ID NO: 683 - DNA, 20 bp, synthetic construct
  source 1..20: mol_type = other DNA
tgtttgtttcttccattgca

SEQ ID NO: 684 - DNA, 20 bp, synthetic construct
  source 1..20: mol_type = other DNA
atgtgtcataattttcttag

SEQ ID NO: 685 - DNA, 20 bp, synthetic construct
  source 1..20: mol_type = other DNA
acaggctccaaaatcatgat

SEQ ID NO: 686 - DNA, 20 bp, synthetic construct
  source 1..20: mol_type = other DNA
agttaataacccactttttt

SEQ ID NO: 687 - DNA, 20 bp, synthetic construct
  source 1..20: mol_type = other DNA
gagcaatatattcaccaaag

SEQ ID NO: 688 - DNA, 20 bp, synthetic construct
  source 1..20: mol_type = other DNA
gttggctaaaaatcttttat

SEQ ID NO: 689 - DNA, 20 bp, synthetic construct
  source 1..20: mol_type = other DNA
acagcctttcctgaccctca

SEQ ID NO: 690 - DNA, 20 bp, synthetic construct
  source 1..20: mol_type = other DNA
gcataattctaaaaatctgt

SEQ ID NO: 691 - DNA, 20 bp, synthetic construct
  source 1..20: mol_type = other DNA
tgcagaaacttctgttatgt

SEQ ID NO: 692 - DNA, 20 bp, synthetic construct
  source 1..20: mol_type = other DNA
gctgtagccatcactgggtt

SEQ ID NO: 693 - DNA, 20 bp, synthetic construct
  source 1..20: mol_type = other DNA
tgaaggattacctcccttaa

SEQ ID NO: 694 - DNA, 20 bp, synthetic construct
  source 1..20: mol_type = other DNA
cccttgtctcttctgagcta

SEQ ID NO: 695 - DNA, 20 bp, synthetic construct
  source 1..20: mol_type = other DNA
gacattatgaaattatactc

SEQ ID NO: 696 - DNA, 20 bp, synthetic construct
  source 1..20: mol_type = other DNA
ggctatctttctatttgtgt

SEQ ID NO: 697 - DNA, 20 bp, synthetic construct
  source 1..20: mol_type = other DNA
tgagagcttttcctcttaga

SEQ ID NO: 698 - DNA, 20 bp, synthetic construct
  source 1..20: mol_type = other DNA
gcgaagcaaattcaacagct

SEQ ID NO: 699 - DNA, 20 bp, synthetic construct
  source 1..20: mol_type = other DNA
ggaggcatcagacttacact

SEQ ID NO: 700 - DNA, 20 bp, synthetic construct
  source 1..20: mol_type = other DNA
tacatgagctcaacagggtg

SEQ ID NO: 701 - DNA, 20 bp, synthetic construct
  source 1..20: mol_type = other DNA
aaggatagtctctttccatc

SEQ ID NO: 702 - DNA, 20 bp, synthetic construct
  source 1..20: mol_type = other DNA
gggagtatcaatttaagcaa

SEQ ID NO: 703 - DNA, 20 bp, synthetic construct
  source 1..20: mol_type = other DNA
gtcagaattctaagggtcaa

SEQ ID NO: 704 - DNA, 20 bp, synthetic construct
  source 1..20: mol_type = other DNA
cccacaacacattattgtgc

SEQ ID NO: 705 - DNA, 20 bp, synthetic construct
  source 1..20: mol_type = other DNA
gtacatatatgctatcgaat

SEQ ID NO: 706 - DNA, 20 bp, synthetic construct
  source 1..20: mol_type = other DNA
aattagtgtgatcatgcaca

SEQ ID NO: 707 - DNA, 20 bp, synthetic construct
  source 1..20: mol_type = other DNA
agatactctctgtcaccagt

SEQ ID NO: 708 - DNA, 20 bp, synthetic construct
  source 1..20: mol_type = other DNA
accatatttataaatttaca

SEQ ID NO: 709 - DNA, 20 bp, synthetic construct
  source 1..20: mol_type = other DNA
tgtgcttattattcatgttc

SEQ ID NO: 710 - DNA, 20 bp, synthetic construct
  source 1..20: mol_type = other DNA
ctgatttcttcaacagcctc

SEQ ID NO: 711 - DNA, 20 bp, synthetic construct
  source 1..20: mol_type = other DNA
ctgaattttctctcccagca

SEQ ID NO: 712 - DNA, 20 bp, synthetic construct
  source 1..20: mol_type = other DNA
ggtcataagcaaatcaaaat

SEQ ID NO: 713 - DNA, 20 bp, synthetic construct
  source 1..20: mol_type = other DNA
tcagagctaatgattaaact

SEQ ID NO: 714 - DNA, 20 bp, synthetic construct
  source 1..20: mol_type = other DNA
cttacctttatcacccaatt

SEQ ID NO: 715 - DNA, 20 bp, synthetic construct
  source 1..20: mol_type = other DNA
tggtttttagtacatttaat

SEQ ID NO: 716 - DNA, 20 bp, synthetic construct
  source 1..20: mol_type = other DNA
cgtaaaacctataatggcat

SEQ ID NO: 717 - DNA, 20 bp, synthetic construct
  source 1..20: mol_type = other DNA
tgctaaacagtacctgctgt

SEQ ID NO: 718 - DNA, 20 bp, synthetic construct
  source 1..20: mol_type = other DNA
tcaaaaatctcttttcaaat

SEQ ID NO: 719 - DNA, 20 bp, synthetic construct
  source 1..20: mol_type = other DNA
agaatgacaatttatgaccc

SEQ ID NO: 720 - DNA, 20 bp, synthetic construct
  source 1..20: mol_type = other DNA
ttcttctaatttttgtacca

SEQ ID NO: 721 - DNA, 20 bp, synthetic construct
  source 1..20: mol_type = other DNA
ctttaattggaaattcggcc

SEQ ID NO: 722 - DNA, 20 bp, synthetic construct
  source 1..20: mol_type = other DNA
ttgataccgcctgcgggtgc

SEQ ID NO: 723 - DNA, 20 bp, synthetic construct
  source 1..20: mol_type = other DNA
gccacaaagagaaccagcat

SEQ ID NO: 724 - DNA, 20 bp, synthetic construct
  source 1..20: mol_type = other DNA
tgcccccagccaccaccatg

SEQ ID NO: 725 - DNA, 20 bp, synthetic construct
  source 1..20: mol_type = other DNA
ccaaggccccccaccactgc

SEQ ID NO: 726 - DNA, 20 bp, synthetic construct
  source 1..20: mol_type = other DNA
caggaagaccttcctcatcc

SEQ ID NO: 727 - DNA, 20 bp, synthetic construct
  source 1..20: mol_type = other DNA
tcatgatgaactcaatcaaa

SEQ ID NO: 728 - DNA, 20 bp, synthetic construct
  source 1..20: mol_type = other DNA
atgaaatctctactaagata

SEQ ID NO: 729 - DNA, 20 bp, synthetic construct
  source 1..20: mol_type = other DNA
aagtatcatgtggcctccta

SEQ ID NO: 730 - DNA, 20 bp, synthetic construct
  source 1..20: mol_type = other DNA
atttactcttgttgaacagc

SEQ ID NO: 731 - DNA, 20 bp, synthetic construct
  source 1..20: mol_type = other DNA
ctgtgaatatgtcctctagc

SEQ ID NO: 732 - DNA, 20 bp, synthetic construct
  source 1..20: mol_type = other DNA
gcctttcatatatgttacag

SEQ ID NO: 733 - DNA, 20 bp, synthetic construct
  source 1..20: mol_type = other DNA
ggcaccattcccaaacattt

SEQ ID NO: 734 - DNA, 20 bp, synthetic construct
  source 1..20: mol_type = other DNA
ctgccttaattacctatagt

SEQ ID NO: 735 - DNA, 20 bp, synthetic construct
  source 1..20: mol_type = other DNA
gagatttgccttcagtgtct

SEQ ID NO: 736 - DNA, 20 bp, synthetic construct
  source 1..20: mol_type = other DNA
gctctcctgtatgtcaaaat

SEQ ID NO: 737 - DNA, 20 bp, synthetic construct
  source 1..20: mol_type = other DNA
tcatcctctatgatgatggt

SEQ ID NO: 738 - DNA, 20 bp, synthetic construct
  source 1..20: mol_type = other DNA
ttgcacactgaccatttttt

SEQ ID NO: 739 - DNA, 20 bp, synthetic construct
  source 1..20: mol_type = other DNA
ttatgagacagaaataaaga

SEQ ID NO: 740 - DNA, 20 bp, synthetic construct
  source 1..20: mol_type = other DNA
caaaagccaattacagaaac

SEQ ID NO: 741 - DNA, 20 bp, synthetic construct
  source 1..20: mol_type = other DNA
tttagattgtctccctattc

SEQ ID NO: 742 - DNA, 20 bp, synthetic construct
  source 1..20: mol_type = other DNA
tcatatttctgtcatctcca

SEQ ID NO: 743 - DNA, 20 bp, synthetic construct
  source 1..20: mol_type = other DNA
agaatttctttttccacttc

SEQ ID NO: 744 - DNA, 20 bp, synthetic construct
  source 1..20: mol_type = other DNA
aatatcaaacaattcaggga

SEQ ID NO: 745 - DNA, 20 bp, synthetic construct
  source 1..20: mol_type = other DNA
aagccaataataacattgca

SEQ ID NO: 746 - DNA, 20 bp, synthetic construct
  source 1..20: mol_type = other DNA
tcagatgttaactgctctaa

SEQ ID NO: 747 - DNA, 20 bp, synthetic construct
  source 1..20: mol_type = other DNA
gggtttcccacatattaagt

SEQ ID NO: 748 - DNA, 20 bp, synthetic construct
  source 1..20: mol_type = other DNA
tatataacaaaacaagaaca

SEQ ID NO: 749 - DNA, 20 bp, synthetic construct
  source 1..20: mol_type = other DNA
gctctcagaacaagaaaata

SEQ ID NO: 750 - DNA, 20 bp, synthetic construct
  source 1..20: mol_type = other DNA
aatcctattctaccaggagt

SEQ ID NO: 751 - DNA, 20 bp, synthetic construct
  source 1..20: mol_type = other DNA
ctgttcctatgtttttgata

SEQ ID NO: 752 - DNA, 20 bp, synthetic construct
  source 1..20: mol_type = other DNA
gatttttccagaagtttaac

SEQ ID NO: 753 - DNA, 20 bp, synthetic construct
  source 1..20: mol_type = other DNA
agtaaaattgctcctttcca

SEQ ID NO: 754 - DNA, 20 bp, synthetic construct
  source 1..20: mol_type = other DNA
catcctacccctctgcctgc

SEQ ID NO: 755 - DNA, 20 bp, synthetic construct
  source 1..20: mol_type = other DNA
taatattttcctttcggtgt

SEQ ID NO: 756 - DNA, 20 bp, synthetic construct
  source 1..20: mol_type = other DNA
tcattttgccatttatctat

SEQ ID NO: 757 - DNA, 20 bp, synthetic construct
  source 1..20: mol_type = other DNA
aaatgataacccaaacatgc

SEQ ID NO: 758 - DNA, 20 bp, synthetic construct
  source 1..20: mol_type = other DNA
ccaaggtcacaaaattgact

SEQ ID NO: 759 - DNA, 20 bp, synthetic construct
  source 1..20: mol_type = other DNA
aaatgcccccaataactcat

SEQ ID NO: 760 - DNA, 20 bp, synthetic construct
  source 1..20: mol_type = other DNA
atacatgcctgtttttgttt

SEQ ID NO: 761 - DNA, 20 bp, synthetic construct
  source 1..20: mol_type = other DNA
aatgtgtcataattttctta

SEQ ID NO: 762 - DNA, 20 bp, synthetic construct
  source 1..20: mol_type = other DNA
atcacaggctccaaaatcat

SEQ ID NO: 763 - DNA, 20 bp, synthetic construct
  source 1..20: mol_type = other DNA
gcagttaataacccactttt

SEQ ID NO: 764 - DNA, 20 bp, synthetic construct
  source 1..20: mol_type = other DNA
agagcaatatattcaccaaa

SEQ ID NO: 765 - DNA, 20 bp, synthetic construct
  source 1..20: mol_type = other DNA
cgttggctaaaaatctttta

SEQ ID NO: 766 - DNA, 20 bp, synthetic construct
  source 1..20: mol_type = other DNA
gatcacagcctttcctgacc

SEQ ID NO: 767 - DNA, 20 bp, synthetic construct
  source 1..20: mol_type = other DNA
cagcataattctaaaaatct

SEQ ID NO: 768 - DNA, 20 bp, synthetic construct
  source 1..20: mol_type = other DNA
ggtgcagaaacttctgttat

SEQ ID NO: 769 - DNA, 20 bp, synthetic construct
  source 1..20: mol_type = other DNA
tgctgtagccatcactgggt

SEQ ID NO: 770 - DNA, 20 bp, synthetic construct
  source 1..20: mol_type = other DNA
ctgaaggattacctccctta

SEQ ID NO: 771 - DNA, 20 bp, synthetic construct
  source 1..20: mol_type = other DNA
ataatgtcccttgtctcttc

SEQ ID NO: 772 - DNA, 20 bp, synthetic construct
  source 1..20: mol_type = other DNA
acacaatacatataatctta

SEQ ID NO: 773 - DNA, 20 bp, synthetic construct
  source 1..20: mol_type = other DNA
aggctatctttctatttgtg

SEQ ID NO: 774 - DNA, 20 bp, synthetic construct
  source 1..20: mol_type = other DNA
ttgagagcttttcctcttag

SEQ ID NO: 775 - DNA, 20 bp, synthetic construct
  source 1..20: mol_type = other DNA
tagcgaagcaaattcaacag

SEQ ID NO: 776 - DNA, 20 bp, synthetic construct
  source 1..20: mol_type = other DNA
gatctcttagatttttggac

SEQ ID NO: 777 - DNA, 20 bp, synthetic construct
  source 1..20: mol_type = other DNA
tagaataaatacatgagctc

SEQ ID NO: 778 - DNA, 20 bp, synthetic construct
  source 1..20: mol_type = other DNA
tgaaaatcaatatcattcct

SEQ ID NO: 779 - DNA, 20 bp, synthetic construct
  source 1..20: mol_type = other DNA
tgggagtatcaatttaagca

SEQ ID NO: 780 - DNA, 20 bp, synthetic construct
  source 1..20: mol_type = other DNA
gtgtcagaattctaagggtc

SEQ ID NO: 781 - DNA, 20 bp, synthetic construct
  source 1..20: mol_type = other DNA
acccacaacacattattgtg

SEQ ID NO: 782 - DNA, 20 bp, synthetic construct
  source 1..20: mol_type = other DNA
gtgtggtacatatatgctat

SEQ ID NO: 783 - DNA, 20 bp, synthetic construct
  source 1..20: mol_type = other DNA
atttgcaattagtgtgatca

SEQ ID NO: 784 - DNA, 20 bp, synthetic construct
  source 1..20: mol_type = other DNA
taagatactctctgtcacca

SEQ ID NO: 785 - DNA, 20 bp, synthetic construct
  source 1..20: mol_type = other DNA
actaaatatttataatggat

SEQ ID NO: 786 - DNA, 20 bp, synthetic construct
  source 1..20: mol_type = other DNA
ctgtgcttattattcatgtt

SEQ ID NO: 787 - DNA, 20 bp, synthetic construct
  source 1..20: mol_type = other DNA
ttctcacctgatttcttcaa

SEQ ID NO: 788 - DNA, 20 bp, synthetic construct
  source 1..20: mol_type = other DNA
tgactgaattttctctccca

SEQ ID NO: 789 - DNA, 20 bp, synthetic construct
  source 1..20: mol_type = other DNA
tggtcataagcaaatcaaaa

SEQ ID NO: 790 - DNA, 20 bp, synthetic construct
  source 1..20: mol_type = other DNA
ttcagagctaatgattaaac

SEQ ID NO: 791 - DNA, 20 bp, synthetic construct
  source 1..20: mol_type = other DNA
ccttacctttatcacccaat

SEQ ID NO: 792 - DNA, 20 bp, synthetic construct
  source 1..20: mol_type = other DNA
catgtacagttcaatggttt

SEQ ID NO: 793 - DNA, 20 bp, synthetic construct
  source 1..20: mol_type = other DNA
ccgtaaaacctataatggca

SEQ ID NO: 794 - DNA, 20 bp, synthetic construct
  source 1..20: mol_type = other DNA
gattgctaaacagtacctgc

SEQ ID NO: 795 - DNA, 20 bp, synthetic construct
  source 1..20: mol_type = other DNA
atcaaaaatctcttttcaaa

SEQ ID NO: 796 - DNA, 20 bp, synthetic construct
  source 1..20: mol_type = other DNA
cagaatgacaatttatgacc

SEQ ID NO: 797 - DNA, 20 bp, synthetic construct
  source 1..20: mol_type = other DNA
tttcttctaatttttgtacc

SEQ ID NO: 798 - DNA, 20 bp, synthetic construct
  source 1..20: mol_type = other DNA
aatcatctttaattggaaat

SEQ ID NO: 799 - DNA, 20 bp, synthetic construct
  source 1..20: mol_type = other DNA
tgaacacttgcatcagttga

SEQ ID NO: 800 - DNA, 20 bp, synthetic construct
  source 1..20: mol_type = other DNA
ccaggtcactccatgtggcc

SEQ ID NO: 801 - DNA, 20 bp, synthetic construct
  source 1..20: mol_type = other DNA
atgaggctgcccccagccac

SEQ ID NO: 802 - DNA, 20 bp, synthetic construct
  source 1..20: mol_type = other DNA
agtaacggtcctcatagtca

SEQ ID NO: 803 - DNA, 20 bp, synthetic construct
  source 1..20: mol_type = other DNA
aagatggtgaaaacaggaag

SEQ ID NO: 804 - DNA, 20 bp, synthetic construct
  source 1..20: mol_type = other DNA
ctgttatacttttactggcc

SEQ ID NO: 805 - DNA, 20 bp, synthetic construct
  source 1..20: mol_type = other DNA
atagctatgaaatctctact

SEQ ID NO: 806 - DNA, 20 bp, synthetic construct
  source 1..20: mol_type = other DNA
taggatttttttgaataagt

SEQ ID NO: 807 - DNA, 20 bp, synthetic construct
  source 1..20: mol_type = other DNA
gacaatatttactcttgttg

SEQ ID NO: 808 - DNA, 20 bp, synthetic construct
  source 1..20: mol_type = other DNA
tgttcactgtgaatatgtcc

SEQ ID NO: 809 - DNA, 20 bp, synthetic construct
  source 1..20: mol_type = other DNA
cccagaagcctttcatatat

SEQ ID NO: 810 - DNA, 20 bp, synthetic construct
  source 1..20: mol_type = other DNA
tccaagggcaccattcccaa

SEQ ID NO: 811 - DNA, 20 bp, synthetic construct
  source 1..20: mol_type = other DNA
tttcagctgccttaattacc

SEQ ID NO: 812 - DNA, 20 bp, synthetic construct
  source 1..20: mol_type = other DNA
aaaggagatttgccttcagt

SEQ ID NO: 813 - DNA, 20 bp, synthetic construct
  source 1..20: mol_type = other DNA
ctgcagctctcctgtatgtc

SEQ ID NO: 814 - DNA, 20 bp, synthetic construct
  source 1..20: mol_type = other DNA
tacatcatcctctatgatga

SEQ ID NO: 815 - DNA, 20 bp, synthetic construct
  source 1..20: mol_type = other DNA
ttttctttgcacactgacca

SEQ ID NO: 816 - DNA, 20 bp, synthetic construct
  source 1..20: mol_type = other DNA
ctaattctggtttttgacaa

SEQ ID NO: 817 - DNA, 20 bp, synthetic construct
  source 1..20: mol_type = other DNA
tctttgattcaaaagccaat

SEQ ID NO: 818 - DNA, 20 bp, synthetic construct
  source 1..20: mol_type = other DNA
gatattttttagattgtctc

SEQ ID NO: 819 - DNA, 20 bp, synthetic construct
  source 1..20: mol_type = other DNA
tcaatcatatttctgtcatc

SEQ ID NO: 820 - DNA, 20 bp, synthetic construct
  source 1..20: mol_type = other DNA
attaacagaatttctttttc

SEQ ID NO: 821 - DNA, 20 bp, synthetic construct
  source 1..20: mol_type = other DNA
ggtgacaatatcaaacaatt

SEQ ID NO: 822 - DNA, 20 bp, synthetic construct
  source 1..20: mol_type = other DNA
gaatactcacaaagtgcaag

SEQ ID NO: 823 - DNA, 20 bp, synthetic construct
  source 1..20: mol_type = other DNA
cattagacacttcagatgtt

SEQ ID NO: 824 - DNA, 20 bp, synthetic construct
  source 1..20: mol_type = other DNA
atgaaacgattcagtgcaca

SEQ ID NO: 825 - DNA, 20 bp, synthetic construct
  source 1..20: mol_type = other DNA
caatttttttatataacaaa

SEQ ID NO: 826 - DNA, 20 bp, synthetic construct
  source 1..20: mol_type = other DNA
cgtgatgctctcagaacaag

SEQ ID NO: 827 - DNA, 20 bp, synthetic construct
  source 1..20: mol_type = other DNA
atccttaatcctattctacc

SEQ ID NO: 828 - DNA, 20 bp, synthetic construct
  source 1..20: mol_type = other DNA
tttatccaattccctgttcc

SEQ ID NO: 829 - DNA, 20 bp, synthetic construct
  source 1..20: mol_type = other DNA
ttgttgatttttccagaagt

SEQ ID NO: 830 - DNA, 20 bp, synthetic construct
  source 1..20: mol_type = other DNA
tgtgtaagtaaaattgctcc

SEQ ID NO: 831 - DNA, 20 bp, synthetic construct
  source 1..20: mol_type = other DNA
caaatcacatcctacccctc

SEQ ID NO: 832 - DNA, 20 bp, synthetic construct
  source 1..20: mol_type = other DNA
aatcttaatattttcctttc

SEQ ID NO: 833 - DNA, 20 bp, synthetic construct
  source 1..20: mol_type = other DNA
aatgactcatcattttgcca

SEQ ID NO: 834 - DNA, 20 bp, synthetic construct
  source 1..20: mol_type = other DNA
tggttattttaatagatgta

SEQ ID NO: 835 - DNA, 20 bp, synthetic construct
  source 1..20: mol_type = other DNA
atcatttcctccattctatg

SEQ ID NO: 836 - DNA, 20 bp, synthetic construct
  source 1..20: mol_type = other DNA
gcttaacaaaatgtttgtca

SEQ ID NO: 837 - DNA, 20 bp, synthetic construct
  source 1..20: mol_type = other DNA
ttctaattttagatcattct

SEQ ID NO: 838 - DNA, 20 bp, synthetic construct
  source 1..20: mol_type = other DNA
ttcatttcagttaatgtgtc

SEQ ID NO: 839 - DNA, 20 bp, synthetic construct
  source 1..20: mol_type = other DNA
agtttttccccacatatcac

SEQ ID NO: 840 - DNA, 20 bp, synthetic construct
  source 1..20: mol_type = other DNA
ttcagatttttcacatatgc

SEQ ID NO: 841 - DNA, 20 bp, synthetic construct
  source 1..20: mol_type = other DNA
tagtgagagcaatatattca

SEQ ID NO: 842 - DNA, 20 bp, synthetic construct
  source 1..20: mol_type = other DNA
gttttgaaaaatattcagga

SEQ ID NO: 843 - DNA, 20 bp, synthetic construct
  source 1..20: mol_type = other DNA
gatcaagagcttgtgatcac

SEQ ID NO: 844 - DNA, 20 bp, synthetic construct
  source 1..20: mol_type = other DNA
cccttacataattcagcata

SEQ ID NO: 845 - DNA, 20 bp, synthetic construct
  source 1..20: mol_type = other DNA
tgacagccatgttcagtgtc

SEQ ID NO: 846 - DNA, 20 bp, synthetic construct
  source 1..20: mol_type = other DNA
cacttaggagttattttata

SEQ ID NO: 847 - DNA, 20 bp, synthetic construct
  source 1..20: mol_type = other DNA
catttataatgcttttcact

SEQ ID NO: 848 - DNA, 20 bp, synthetic construct
  source 1..20: mol_type = other DNA
cttaattagttacatcggga

SEQ ID NO: 849 - DNA, 20 bp, synthetic construct
  source 1..20: mol_type = other DNA
cgtgtgagcattcttgtctt

SEQ ID NO: 850 - DNA, 20 bp, synthetic construct
  source 1..20: mol_type = other DNA
aacattaattatccccccat

SEQ ID NO: 851 - DNA, 20 bp, synthetic construct
  source 1..20: mol_type = other DNA
cattgtacctcaacacaata

SEQ ID NO: 852 - DNA, 20 bp, synthetic construct
  source 1..20: mol_type = other DNA
accagcattatcctgatgtc

SEQ ID NO: 853 - DNA, 20 bp, synthetic construct
  source 1..20: mol_type = other DNA
tcaaaggtaattttataacc

SEQ ID NO: 854 - DNA, 20 bp, synthetic construct
  source 1..20: mol_type = other DNA
ctaggtataatttttttacc

SEQ ID NO: 855 - DNA, 20 bp, synthetic construct
  source 1..20: mol_type = other DNA
tgttgaaaagttttcaatga

SEQ ID NO: 856 - DNA, 20 bp, synthetic construct
  source 1..20: mol_type = other DNA
ggtgatgccatctactgaaa

SEQ ID NO: 857 - DNA, 20 bp, synthetic construct
  source 1..20: mol_type = other DNA
taacacacatttcaagtgtc

SEQ ID NO: 858 - DNA, 20 bp, synthetic construct
  source 1..20: mol_type = other DNA
agtaccataacctttttttt

SEQ ID NO: 859 - DNA, 20 bp, synthetic construct
  source 1..20: mol_type = other DNA
acggaaatatcattcgactc

SEQ ID NO: 860 - DNA, 20 bp, synthetic construct
  source 1..20: mol_type = other DNA
ctagctgacactatttgcaa

SEQ ID NO: 861 - DNA, 20 bp, synthetic construct
  source 1..20: mol_type = other DNA
agaggagaagaaccaggcac

SEQ ID NO: 862 - DNA, 20 bp, synthetic construct
  source 1..20: mol_type = other DNA
gcataaggaataatcaaact

SEQ ID NO: 863 - DNA, 20 bp, synthetic construct
  source 1..20: mol_type = other DNA
ttatgttatttcctctgtgc

SEQ ID NO: 864 - DNA, 20 bp, synthetic construct
  source 1..20: mol_type = other DNA
ttattcggtgcttccatcac

SEQ ID NO: 865 - DNA, 20 bp, synthetic construct
  source 1..20: mol_type = other DNA
atgtcagcaccttctccatt

SEQ ID NO: 866 - DNA, 20 bp, synthetic construct
  source 1..20: mol_type = other DNA
ctaacattattgaaatggga

SEQ ID NO: 867 - DNA, 20 bp, synthetic construct
  source 1..20: mol_type = other DNA
attatttttcatctccttca

SEQ ID NO: 868 - DNA, 20 bp, synthetic construct
  source 1..20: mol_type = other DNA
aaccccttacctttatcacc

SEQ ID NO: 869 - DNA, 20 bp, synthetic construct
  source 1..20: mol_type = other DNA
attcaccatataccatgtac

SEQ ID NO: 870 - DNA, 20 bp, synthetic construct
  source 1..20: mol_type = other DNA
aaatcatcactgtgtgccgt

SEQ ID NO: 871 - DNA, 20 bp, synthetic construct
  source 1..20: mol_type = other DNA
agagacctatgacaatagta

SEQ ID NO: 872 - DNA, 20 bp, synthetic construct
  source 1..20: mol_type = other DNA
atcaaatcaaaaatctcttt

SEQ ID NO: 873 - DNA, 20 bp, synthetic construct
  source 1..20: mol_type = other DNA
atcaaacatccagaatgaca

SEQ ID NO: 874 - DNA, 20 bp, synthetic construct
  source 1..20: mol_type = other DNA
gttcattatttaacatttta

SEQ ID NO: 875 - DNA, 20 bp, synthetic construct
  source 1..20: mol_type = other DNA
aaaaatcatctttaattgga

SEQ ID NO: 876 - DNA, 20 bp, synthetic construct
  source 1..20: mol_type = other DNA
ttgaacacttgcatcagttg

SEQ ID NO: 877 - DNA, 20 bp, synthetic construct
  source 1..20: mol_type = other DNA
gtgttccatcctccaggctt

SEQ ID NO: 878 - DNA, 20 bp, synthetic construct
  source 1..20: mol_type = other DNA
catgaggctgcccccagcca

SEQ ID NO: 879 - DNA, 20 bp, synthetic construct
  source 1..20: mol_type = other DNA
tgcatgttttcacgatagta

SEQ ID NO: 880 - DNA, 20 bp, synthetic construct
  source 1..20: mol_type = other DNA
tgagacaccaccactaaaag

SEQ ID NO: 881 - DNA, 20 bp, synthetic construct
  source 1..20: mol_type = other DNA
tttgctgttatacttttact

SEQ ID NO: 882 - DNA, 20 bp, synthetic construct
  source 1..20: mol_type = other DNA
aaatagctatgaaatctcta

SEQ ID NO: 883 - DNA, 20 bp, synthetic construct
  source 1..20: mol_type = other DNA
tctaggatttttttgaataa

SEQ ID NO: 884 - DNA, 20 bp, synthetic construct
  source 1..20: mol_type = other DNA
tgacaatatttactcttgtt

SEQ ID NO: 885 - DNA, 20 bp, synthetic construct
  source 1..20: mol_type = other DNA
atgttcactgtgaatatgtc

SEQ ID NO: 886 - DNA, 20 bp, synthetic construct
  source 1..20: mol_type = other DNA
tcccagaagcctttcatata

SEQ ID NO: 887 - DNA, 20 bp, synthetic construct
  source 1..20: mol_type = other DNA
ctccaagggcaccattccca

SEQ ID NO: 888 - DNA, 20 bp, synthetic construct
  source 1..20: mol_type = other DNA
tttacttttcagctgcctta

SEQ ID NO: 889 - DNA, 20 bp, synthetic construct
  source 1..20: mol_type = other DNA
caaaggagatttgccttcag

SEQ ID NO: 890 - DNA, 20 bp, synthetic construct
  source 1..20: mol_type = other DNA
actgcagctctcctgtatgt

SEQ ID NO: 891 - DNA, 20 bp, synthetic construct
  source 1..20: mol_type = other DNA
ttacatcatcctctatgatg

SEQ ID NO: 892 - DNA, 20 bp, synthetic construct
  source 1..20: mol_type = other DNA
cttttctttgcacactgacc

SEQ ID NO: 893 - DNA, 20 bp, synthetic construct
  source 1..20: mol_type = other DNA
cctaattctggtttttgaca

SEQ ID NO: 894 - DNA, 20 bp, synthetic construct
  source 1..20: mol_type = other DNA
ttctttgattcaaaagccaa

SEQ ID NO: 895 - DNA, 20 bp, synthetic construct
  source 1..20: mol_type = other DNA
agatattttttagattgtct

SEQ ID NO: 896 - DNA, 20 bp, synthetic construct
  source 1..20: mol_type = other DNA
atcaatcatatttctgtcat

SEQ ID NO: 897 - DNA, 20 bp, synthetic construct
  source 1..20: mol_type = other DNA
ttaacattaacagaatttct

SEQ ID NO: 898 - DNA, 20 bp, synthetic construct
  source 1..20: mol_type = other DNA
aggtgacaatatcaaacaat

SEQ ID NO: 899 - DNA, 20 bp, synthetic construct
  source 1..20: mol_type = other DNA
agaatactcacaaagtgcaa

SEQ ID NO: 900 - DNA, 20 bp, synthetic construct
  source 1..20: mol_type = other DNA
gcattagacacttcagatgt

SEQ ID NO: 901 - DNA, 20 bp, synthetic construct
  source 1..20: mol_type = other DNA
attcttacatgaaacgattc

SEQ ID NO: 902 - DNA, 20 bp, synthetic construct
  source 1..20: mol_type = other DNA
tacaatttttttatataaca

SEQ ID NO: 903 - DNA, 20 bp, synthetic construct
  source 1..20: mol_type = other DNA
ccgtgatgctctcagaacaa

SEQ ID NO: 904 - DNA, 20 bp, synthetic construct
  source 1..20: mol_type = other DNA
aatccttaatcctattctac

SEQ ID NO: 905 - DNA, 20 bp, synthetic construct
  source 1..20: mol_type = other DNA
atttatccaattccctgttc

SEQ ID NO: 906 - DNA, 20 bp, synthetic construct
  source 1..20: mol_type = other DNA
gttgttgatttttccagaag

SEQ ID NO: 907 - DNA, 20 bp, synthetic construct
  source 1..20: mol_type = other DNA
ttgtgtaagtaaaattgctc

SEQ ID NO: 908 - DNA, 20 bp, synthetic construct
  source 1..20: mol_type = other DNA
acaaatcacatcctacccct

SEQ ID NO: 909 - DNA, 20 bp, synthetic construct
  source 1..20: mol_type = other DNA
taatcttaatattttccttt

SEQ ID NO: 910 - DNA, 20 bp, synthetic construct
  source 1..20: mol_type = other DNA
aaatgactcatcattttgcc

SEQ ID NO: 911 - DNA, 20 bp, synthetic construct
  source 1..20: mol_type = other DNA
ttggttattttaatagatgt

SEQ ID NO: 912 - DNA, 20 bp, synthetic construct
  source 1..20: mol_type = other DNA
ctatcatttcctccattcta

SEQ ID NO: 913 - DNA, 20 bp, synthetic construct
  source 1..20: mol_type = other DNA
tgcttaacaaaatgtttgtc

SEQ ID NO: 914 - DNA, 20 bp, synthetic construct
  source 1..20: mol_type = other DNA
gttctaattttagatcattc

SEQ ID NO: 915 - DNA, 20 bp, synthetic construct
  source 1..20: mol_type = other DNA
atgttcatttcagttaatgt

SEQ ID NO: 916 - DNA, 20 bp, synthetic construct
  source 1..20: mol_type = other DNA
cagtttttccccacatatca

SEQ ID NO: 917 - DNA, 20 bp, synthetic construct
  source 1..20: mol_type = other DNA
tttcagatttttcacatatg

SEQ ID NO: 918 - DNA, 20 bp, synthetic construct
  source 1..20: mol_type = other DNA
gtgaactattttttaaacgc

SEQ ID NO: 919 - DNA, 20 bp, synthetic construct
  source 1..20: mol_type = other DNA
atggctgaaattgttcagtt

SEQ ID NO: 920 - DNA, 20 bp, synthetic construct
  source 1..20: mol_type = other DNA
ccgagtggcctctggatcaa

SEQ ID NO: 921 - DNA, 20 bp, synthetic construct
  source 1..20: mol_type = other DNA
tcccttacataattcagcat

SEQ ID NO: 922 - DNA, 20 bp, synthetic construct
  source 1..20: mol_type = other DNA
gttgacagccatgttcagtg

SEQ ID NO: 923 - DNA, 20 bp, synthetic construct
  source 1..20: mol_type = other DNA
cacacactattcacttagga

SEQ ID NO: 924 - DNA, 20 bp, synthetic construct
  source 1..20: mol_type = other DNA
acatttataatgcttttcac

SEQ ID NO: 925 - DNA, 20 bp, synthetic construct
  source 1..20: mol_type = other DNA
gaagcttaattagttacatc

SEQ ID NO: 926 - DNA, 20 bp, synthetic construct
  source 1..20: mol_type = other DNA
tgcagtaccatatgttgaat

SEQ ID NO: 927 - DNA, 20 bp, synthetic construct
  source 1..20: mol_type = other DNA
caacattaattatcccccca

SEQ ID NO: 928 - DNA, 20 bp, synthetic construct
  source 1..20: mol_type = other DNA
gcattgtacctcaacacaat

SEQ ID NO: 929 - DNA, 20 bp, synthetic construct
  source 1..20: mol_type = other DNA
caagttttttttctaagcat

SEQ ID NO: 930 - DNA, 20 bp, synthetic construct
  source 1..20: mol_type = other DNA
tcagtcagaattcaaaggta

SEQ ID NO: 931 - DNA, 20 bp, synthetic construct
  source 1..20: mol_type = other DNA
tctaggtataatttttttac

SEQ ID NO: 932 - DNA, 20 bp, synthetic construct
  source 1..20: mol_type = other DNA
aaagattttcttcagatgtt

SEQ ID NO: 933 - DNA, 20 bp, synthetic construct
  source 1..20: mol_type = other DNA
gtctgggacttccataacca

SEQ ID NO: 934 - DNA, 20 bp, synthetic construct
  source 1..20: mol_type = other DNA
ttaacacacatttcaagtgt

SEQ ID NO: 935 - DNA, 20 bp, synthetic construct
  source 1..20: mol_type = other DNA
cagtaccataaccttttttt

SEQ ID NO: 936 - DNA, 20 bp, synthetic construct
  source 1..20: mol_type = other DNA
gacggaaatatcattcgact

SEQ ID NO: 937 - DNA, 20 bp, synthetic construct
  source 1..20: mol_type = other DNA
gctaagaatacactcagaaa

SEQ ID NO: 938 - DNA, 20 bp, synthetic construct
  source 1..20: mol_type = other DNA
agagacacctgaacaggcga

SEQ ID NO: 939 - DNA, 20 bp, synthetic construct
  source 1..20: mol_type = other DNA
agcataaggaataatcaaac

SEQ ID NO: 940 - DNA, 20 bp, synthetic construct
  source 1..20: mol_type = other DNA
attatgttatttcctctgtg

SEQ ID NO: 941 - DNA, 20 bp, synthetic construct
  source 1..20: mol_type = other DNA
catgaccatcttattcggtg

SEQ ID NO: 942 - DNA, 20 bp, synthetic construct
  source 1..20: mol_type = other DNA
ttatgtcagcaccttctcca

SEQ ID NO: 943 - DNA, 20 bp, synthetic construct
  source 1..20: mol_type = other DNA
ttctactaacattattgaaa

SEQ ID NO: 944 - DNA, 20 bp, synthetic construct
  source 1..20: mol_type = other DNA
aattatttttcatctccttc

SEQ ID NO: 945 - DNA, 20 bp, synthetic construct
  source 1..20: mol_type = other DNA
aaaccccttacctttatcac

SEQ ID NO: 946 - DNA, 20 bp, synthetic construct
  source 1..20: mol_type = other DNA
taattcaccatataccatgt

SEQ ID NO: 947 - DNA, 20 bp, synthetic construct
  source 1..20: mol_type = other DNA
ccaaatcatcactgtgtgcc

SEQ ID NO: 948 - DNA, 20 bp, synthetic construct
  source 1..20: mol_type = other DNA
gagcagagacctatgacaat

SEQ ID NO: 949 - DNA, 20 bp, synthetic construct
  source 1..20: mol_type = other DNA
catcaaatcaaaaatctctt

SEQ ID NO: 950 - DNA, 20 bp, synthetic construct
  source 1..20: mol_type = other DNA
gatcaaacatccagaatgac

SEQ ID NO: 951 - DNA, 20 bp, synthetic construct
  source 1..20: mol_type = other DNA
tagttcattatttaacattt

SEQ ID NO: 952 - DNA, 20 bp, synthetic construct
  source 1..20: mol_type = other DNA
taaaaatcatctttaattgg

SEQ ID NO: 953 - DNA, 20 bp, synthetic construct
  source 1..20: mol_type = other DNA
cttgaacacttgcatcagtt

SEQ ID NO: 954 - DNA, 20 bp, synthetic construct
  source 1..20: mol_type = other DNA
cagtgttccatcctccaggc

SEQ ID NO: 955 - DNA, 20 bp, synthetic construct
  source 1..20: mol_type = other DNA
ccatgaggctgcccccagcc

SEQ ID NO: 956 - DNA, 20 bp, synthetic construct
  source 1..20: mol_type = other DNA
ttgttctggttgctgtactc

SEQ ID NO: 957 - DNA, 20 bp, synthetic construct
  source 1..20: mol_type = other DNA
gagtgagacaccaccactaa

SEQ ID NO: 958 - DNA, 20 bp, synthetic construct
  source 1..20: mol_type = other DNA
cagattaaccaatggttatt

SEQ ID NO: 959 - DNA, 20 bp, synthetic construct
  source 1..20: mol_type = other DNA
aaaatatctctaaatagcta

SEQ ID NO: 960 - DNA, 20 bp, synthetic construct
  source 1..20: mol_type = other DNA
ctctaggatttttttgaata

SEQ ID NO: 961 - DNA, 20 bp, synthetic construct
  source 1..20: mol_type = other DNA
gtgacaatatttactcttgt

SEQ ID NO: 962 - DNA, 20 bp, synthetic construct
  source 1..20: mol_type = other DNA
gttatgttcactgtgaatat

SEQ ID NO: 963 - DNA, 20 bp, synthetic construct
  source 1..20: mol_type = other DNA
gtcccagaagcctttcatat

SEQ ID NO: 964 - DNA, 20 bp, synthetic construct
  source 1..20: mol_type = other DNA
aggttgcctccaagggcacc

SEQ ID NO: 965 - DNA, 20 bp, synthetic construct
  source 1..20: mol_type = other DNA
atttacttttcagctgcctt

SEQ ID NO: 966 - DNA, 20 bp, synthetic construct
  source 1..20: mol_type = other DNA
tttccaggtaaatggacaaa

SEQ ID NO: 967 - DNA, 20 bp, synthetic construct
  source 1..20: mol_type = other DNA
tcacaactgcagctctcctg

SEQ ID NO: 968 - DNA, 20 bp, synthetic construct
  source 1..20: mol_type = other DNA
aattacatcatcctctatga

SEQ ID NO: 969 - DNA, 20 bp, synthetic construct
  source 1..20: mol_type = other DNA
tcttttctttgcacactgac

SEQ ID NO: 970 - DNA, 20 bp, synthetic construct
  source 1..20: mol_type = other DNA
acctaattctggtttttgac

SEQ ID NO: 971 - DNA, 20 bp, synthetic construct
  source 1..20: mol_type = other DNA
attctttgattcaaaagcca

SEQ ID NO: 972 - DNA, 20 bp, synthetic construct
  source 1..20: mol_type = other DNA
aagatattttttagattgtc

SEQ ID NO: 973 - DNA, 20 bp, synthetic construct
  source 1..20: mol_type = other DNA
aatcaatcatatttctgtca

SEQ ID NO: 974 - DNA, 20 bp, synthetic construct
  source 1..20: mol_type = other DNA
attaacattaacagaatttc

SEQ ID NO: 975 - DNA, 20 bp, synthetic construct
  source 1..20: mol_type = other DNA
taggtgacaatatcaaacaa

SEQ ID NO: 976 - DNA, 20 bp, synthetic construct
  source 1..20: mol_type = other DNA
tagaatactcacaaagtgca

SEQ ID NO: 977 - DNA, 20 bp, synthetic construct
  source 1..20: mol_type = other DNA
gttaatgcattagacacttc

SEQ ID NO: 978 - DNA, 20 bp, synthetic construct
  source 1..20: mol_type = other DNA
ctttggattcttacatgaaa

SEQ ID NO: 979 - DNA, 20 bp, synthetic construct
  source 1..20: mol_type = other DNA
atattaaacatttacaattt

SEQ ID NO: 980 - DNA, 20 bp, synthetic construct
  source 1..20: mol_type = other DNA
accgtgatgctctcagaaca

SEQ ID NO: 981 - DNA, 20 bp, synthetic construct
  source 1..20: mol_type = other DNA
aaatccttaatcctattcta

SEQ ID NO: 982 - DNA, 20 bp, synthetic construct
  source 1..20: mol_type = other DNA
tatttatccaattccctgtt

SEQ ID NO: 983 - DNA, 20 bp, synthetic construct
  source 1..20: mol_type = other DNA
tcttctacaaatctaagagc

SEQ ID NO: 984 - DNA, 20 bp, synthetic construct
  source 1..20: mol_type = other DNA
ctctgtgtttgtgtaagtaa

SEQ ID NO: 985 - DNA, 20 bp, synthetic construct
  source 1..20: mol_type = other DNA
tacaaatcacatcctacccc

SEQ ID NO: 986 - DNA, 20 bp, synthetic construct
  source 1..20: mol_type = other DNA
ataatcttaatattttcctt

SEQ ID NO: 987 - DNA, 20 bp, synthetic construct
  source 1..20: mol_type = other DNA
taaatgactcatcattttgc

SEQ ID NO: 988 - DNA, 20 bp, synthetic construct
  source 1..20: mol_type = other DNA
ttttggttattttaatagat

SEQ ID NO: 989 - DNA, 20 bp, synthetic construct
  source 1..20: mol_type = other DNA
gctatcatttcctccattct

SEQ ID NO: 990 - DNA, 20 bp, synthetic construct
  source 1..20: mol_type = other DNA
gattgcttaacaaaatgttt

SEQ ID NO: 991 - DNA, 20 bp, synthetic construct
  source 1..20: mol_type = other DNA
gtgttctaattttagatcat

SEQ ID NO: 992 - DNA, 20 bp, synthetic construct
  source 1..20: mol_type = other DNA
ataatgttcatttcagttaa

SEQ ID NO: 993 - DNA, 20 bp, synthetic construct
  source 1..20: mol_type = other DNA
tcagtttttccccacatatc

SEQ ID NO: 994 - DNA, 20 bp, synthetic construct
  source 1..20: mol_type = other DNA
ctttcagatttttcacatat

SEQ ID NO: 995 - DNA, 20 bp, synthetic construct
  source 1..20: mol_type = other DNA
ctgtgaactattttttaaac

SEQ ID NO: 996 - DNA, 20 bp, synthetic construct
  source 1..20: mol_type = other DNA
tagatttgtgcctccaggaa

SEQ ID NO: 997 - DNA, 20 bp, synthetic construct
  source 1..20: mol_type = other DNA
tcacacagatgcacccgagt

SEQ ID NO: 998 - DNA, 20 bp, synthetic construct
  source 1..20: mol_type = other DNA
ctcccttacataattcagca

SEQ ID NO: 999 - DNA, 20 bp, synthetic construct
  source 1..20: mol_type = other DNA
agaatctttcaccttggttt

SEQ ID NO: 1000 - DNA, 20 bp, synthetic construct
  source 1..20: mol_type = other DNA
gaattgctgcacacactatt

SEQ ID NO: 1001 - DNA, 20 bp, synthetic construct
  source 1..20: mol_type = other DNA
cttcaacatttataatgctt

SEQ ID NO: 1002 - DNA, 20 bp, synthetic construct
  source 1..20: mol_type = other DNA
acttgaagcttaattagtta

SEQ ID NO: 1003 - DNA, 20 bp, synthetic construct
  source 1..20: mol_type = other DNA
ggaacaatttaactttttcc

SEQ ID NO: 1004 - DNA, 20 bp, synthetic construct
  source 1..20: mol_type = other DNA
acaacattaattatcccccc

SEQ ID NO: 1005 - DNA, 20 bp, synthetic construct
  source 1..20: mol_type = other DNA
agcattgtacctcaacacaa

SEQ ID NO: 1006 - DNA, 20 bp, synthetic construct
  source 1..20: mol_type = other DNA
tcaagttttttttctaagca

SEQ ID NO: 1007 - DNA, 20 bp, synthetic construct
  source 1..20: mol_type = other DNA
agtaaacacaatttcagtca

SEQ ID NO: 1008 - DNA, 20 bp, synthetic construct
  source 1..20: mol_type = other DNA
catctaggtataattttttt

SEQ ID NO: 1009 - DNA, 20 bp, synthetic construct
  source 1..20: mol_type = other DNA
agaaaagattttcttcagat

SEQ ID NO: 1010 - DNA, 20 bp, synthetic construct
  source 1..20: mol_type = other DNA
tgagacatattttacagaaa

SEQ ID NO: 1011 - DNA, 20 bp, synthetic construct
  source 1..20: mol_type = other DNA
cttaacacacatttcaagtg

SEQ ID NO: 1012 - DNA, 20 bp, synthetic construct
  source 1..20: mol_type = other DNA
tgtaatataatatttacagt

SEQ ID NO: 1013 - DNA, 20 bp, synthetic construct
  source 1..20: mol_type = other DNA
gaatttgattacatcctcaa

SEQ ID NO: 1014 - DNA, 20 bp, synthetic construct
  source 1..20: mol_type = other DNA
aatacctgtttattactaag

SEQ ID NO: 1015 - DNA, 20 bp, synthetic construct
  source 1..20: mol_type = other DNA
ctcttagagacacctgaaca

SEQ ID NO: 1016 - DNA, 20 bp, synthetic construct
  source 1..20: mol_type = other DNA
acacatgttataaagcataa

SEQ ID NO: 1017 - DNA, 20 bp, synthetic construct
  source 1..20: mol_type = other DNA
gagatattatgttatttcct

SEQ ID NO: 1018 - DNA, 20 bp, synthetic construct
  source 1..20: mol_type = other DNA
caatttttccaacatgacca

SEQ ID NO: 1019 - DNA, 20 bp, synthetic construct
  source 1..20: mol_type = other DNA
aagggcttttatgtcagcac

SEQ ID NO: 1020 - DNA, 20 bp, synthetic construct
  source 1..20: mol_type = other DNA
tttctactaacattattgaa

SEQ ID NO: 1021 - DNA, 20 bp, synthetic construct
  source 1..20: mol_type = other DNA
aaattatttttcatctcctt

SEQ ID NO: 1022 - DNA, 20 bp, synthetic construct
  source 1..20: mol_type = other DNA
cagaaaccccttacctttat

SEQ ID NO: 1023 - DNA, 20 bp, synthetic construct
  source 1..20: mol_type = other DNA
tataattcaccatataccat

SEQ ID NO: 1024 - DNA, 20 bp, synthetic construct
  source 1..20: mol_type = other DNA
tccaaatcatcactgtgtgc

SEQ ID NO: 1025 - DNA, 20 bp, synthetic construct
  source 1..20: mol_type = other DNA
agagcagagacctatgacaa

SEQ ID NO: 1026 - DNA, 20 bp, synthetic construct
  source 1..20: mol_type = other DNA
tcatcaaatcaaaaatctct

SEQ ID NO: 1027 - DNA, 20 bp, synthetic construct
  source 1..20: mol_type = other DNA
acagatcaaacatccagaat

SEQ ID NO: 1028 - DNA, 20 bp, synthetic construct
  source 1..20: mol_type = other DNA
cttttagttcattatttaac

SEQ ID NO: 1029 - DNA, 20 bp, synthetic construct
  source 1..20: mol_type = other DNA
tgtaaaaatcatctttaatt

SEQ ID NO: 1030 - DNA, 20 bp, synthetic construct
  source 1..20: mol_type = other DNA
gcttgaacacttgcatcagt

SEQ ID NO: 1031 - DNA, 20 bp, synthetic construct
  source 1..20: mol_type = other DNA
cccagtgttccatcctccag

SEQ ID NO: 1032 - DNA, 20 bp, synthetic construct
  source 1..20: mol_type = other DNA
accatgaggctgcccccagc

SEQ ID NO: 1033 - DNA, 20 bp, synthetic construct
  source 1..20: mol_type = other DNA
gcttgattgtgatattgacg

SEQ ID NO: 1034 - DNA, 20 bp, synthetic construct
  source 1..20: mol_type = other DNA
aagagtgagacaccaccact

SEQ ID NO: 1035 - DNA, 20 bp, synthetic construct
  source 1..20: mol_type = other DNA
tccagattaaccaatggtta

SEQ ID NO: 1036 - DNA, 20 bp, synthetic construct
  source 1..20: mol_type = other DNA
tggaaaatatctctaaatag

SEQ ID NO: 1037 - DNA, 20 bp, synthetic construct
  source 1..20: mol_type = other DNA
agctaagaatctctaggatt

SEQ ID NO: 1038 - DNA, 20 bp, synthetic construct
  source 1..20: mol_type = other DNA
tgtgacaatatttactcttg

SEQ ID NO: 1039 - DNA, 20 bp, synthetic construct
  source 1..20: mol_type = other DNA
agttatgttcactgtgaata

SEQ ID NO: 1040 - DNA, 20 bp, synthetic construct
  source 1..20: mol_type = other DNA
atttcaagtcccagaagcct

SEQ ID NO: 1041 - DNA, 20 bp, synthetic construct
  source 1..20: mol_type = other DNA
gaggttgcctccaagggcac

SEQ ID NO: 1042 - DNA, 20 bp, synthetic construct
  source 1..20: mol_type = other DNA
caatttacttttcagctgcc

SEQ ID NO: 1043 - DNA, 20 bp, synthetic construct
  source 1..20: mol_type = other DNA
gtttccaggtaaatggacaa

SEQ ID NO: 1044 - DNA, 20 bp, synthetic construct
  source 1..20: mol_type = other DNA
ctttcacaactgcagctctc

SEQ ID NO: 1045 - DNA, 20 bp, synthetic construct
  source 1..20: mol_type = other DNA
ttaattacatcatcctctat

SEQ ID NO: 1046 - DNA, 20 bp, synthetic construct
  source 1..20: mol_type = other DNA
ttcttttctttgcacactga

SEQ ID NO: 1047 - DNA, 20 bp, synthetic construct
  source 1..20: mol_type = other DNA
gacctaattctggtttttga

SEQ ID NO: 1048 - DNA, 20 bp, synthetic construct
  source 1..20: mol_type = other DNA
tattctttgattcaaaagcc

SEQ ID NO: 1049 - DNA, 20 bp, synthetic construct
  source 1..20: mol_type = other DNA
ctaagatattttttagattg

SEQ ID NO: 1050 - DNA, 20 bp, synthetic construct
  source 1..20: mol_type = other DNA
aaatcaatcatatttctgtc

SEQ ID NO: 1051 - DNA, 20 bp, synthetic construct
  source 1..20: mol_type = other DNA
taattaacattaacagaatt

SEQ ID NO: 1052 - DNA, 20 bp, synthetic construct
  source 1..20: mol_type = other DNA
ctaggtgacaatatcaaaca

SEQ ID NO: 1053 - DNA, 20 bp, synthetic construct
  source 1..20: mol_type = other DNA
atagaatactcacaaagtgc

SEQ ID NO: 1054 - DNA, 20 bp, synthetic construct
  source 1..20: mol_type = other DNA
agttaatgcattagacactt

SEQ ID NO: 1055 - DNA, 20 bp, synthetic construct
  source 1..20: mol_type = other DNA
actttggattcttacatgaa

SEQ ID NO: 1056 - DNA, 20 bp, synthetic construct
  source 1..20: mol_type = other DNA
gatattaaacatttacaatt

SEQ ID NO: 1057 - DNA, 20 bp, synthetic construct
  source 1..20: mol_type = other DNA
aaaccgtgatgctctcagaa

SEQ ID NO: 1058 - DNA, 20 bp, synthetic construct
  source 1..20: mol_type = other DNA
aaaatccttaatcctattct

SEQ ID NO: 1059 - DNA, 20 bp, synthetic construct
  source 1..20: mol_type = other DNA
atatttatccaattccctgt

SEQ ID NO: 1060 - DNA, 20 bp, synthetic construct
  source 1..20: mol_type = other DNA
cctttcttctacaaatctaa

SEQ ID NO: 1061 - DNA, 20 bp, synthetic construct
  source 1..20: mol_type = other DNA
tgtaagaccttctctgtgtt

SEQ ID NO: 1062 - DNA, 20 bp, synthetic construct
  source 1..20: mol_type = other DNA
catacaaatcacatcctacc

SEQ ID NO: 1063 - DNA, 20 bp, synthetic construct
  source 1..20: mol_type = other DNA
tataatcttaatattttcct

SEQ ID NO: 1064 - DNA, 20 bp, synthetic construct
  source 1..20: mol_type = other DNA
tgtaaatgactcatcatttt

SEQ ID NO: 1065 - DNA, 20 bp, synthetic construct
  source 1..20: mol_type = other DNA
actattaattattttggtta

SEQ ID NO: 1066 - DNA, 20 bp, synthetic construct
  source 1..20: mol_type = other DNA
agctatcatttcctccattc

SEQ ID NO: 1067 - DNA, 20 bp, synthetic construct
  source 1..20: mol_type = other DNA
agattgcttaacaaaatgtt

SEQ ID NO: 1068 - DNA, 20 bp, synthetic construct
  source 1..20: mol_type = other DNA
ggtgttctaattttagatca

SEQ ID NO: 1069 - DNA, 20 bp, synthetic construct
  source 1..20: mol_type = other DNA
cataatgttcatttcagtta

SEQ ID NO: 1070 - DNA, 20 bp, synthetic construct
  source 1..20: mol_type = other DNA
tgtcagtttttccccacata

SEQ ID NO: 1071 - DNA, 20 bp, synthetic construct
  source 1..20: mol_type = other DNA
cctttcagatttttcacata

SEQ ID NO: 1072 - DNA, 20 bp, synthetic construct
  source 1..20: mol_type = other DNA
tgggtccatttcatctaaaa

SEQ ID NO: 1073 - DNA, 20 bp, synthetic construct
  source 1..20: mol_type = other DNA
ggttcagctaaactagattt

SEQ ID NO: 1074 - DNA, 20 bp, synthetic construct
  source 1..20: mol_type = other DNA
ggtgtcagtcacacagatgc

SEQ ID NO: 1075 - DNA, 20 bp, synthetic construct
  source 1..20: mol_type = other DNA
tgctcccttacataattcag

SEQ ID NO: 1076 - DNA, 20 bp, synthetic construct
  source 1..20: mol_type = other DNA
gagaatctttcaccttggtt

SEQ ID NO: 1077 - DNA, 20 bp, synthetic construct
  source 1..20: mol_type = other DNA
gctgtgagaattgctgcaca

SEQ ID NO: 1078 - DNA, 20 bp, synthetic construct
  source 1..20: mol_type = other DNA
atcttcaacatttataatgc

SEQ ID NO: 1079 - DNA, 20 bp, synthetic construct
  source 1..20: mol_type = other DNA
aaacacattacaacttgaag

SEQ ID NO: 1080 - DNA, 20 bp, synthetic construct
  source 1..20: mol_type = other DNA
tatttctttcctgatagttc

SEQ ID NO: 1081 - DNA, 20 bp, synthetic construct
  source 1..20: mol_type = other DNA
aacaacattaattatccccc

SEQ ID NO: 1082 - DNA, 20 bp, synthetic construct
  source 1..20: mol_type = other DNA
aagcattgtacctcaacaca

SEQ ID NO: 1083 - DNA, 20 bp, synthetic construct
  source 1..20: mol_type = other DNA
atcaagttttttttctaagc

SEQ ID NO: 1084 - DNA, 20 bp, synthetic construct
  source 1..20: mol_type = other DNA
gcaaataatctacaaagtaa

SEQ ID NO: 1085 - DNA, 20 bp, synthetic construct
  source 1..20: mol_type = other DNA
ctataaattcatctaggtat

SEQ ID NO: 1086 - DNA, 20 bp, synthetic construct
  source 1..20: mol_type = other DNA
aggagctctattaataggtt

SEQ ID NO: 1087 - DNA, 20 bp, synthetic construct
  source 1..20: mol_type = other DNA
atgagacatattttacagaa

SEQ ID NO: 1088 - DNA, 20 bp, synthetic construct
  source 1..20: mol_type = other DNA
gcttaacacacatttcaagt

SEQ ID NO: 1089 - DNA, 20 bp, synthetic construct
  source 1..20: mol_type = other DNA
gctgtcaaaaattatacact

SEQ ID NO: 1090 - DNA, 20 bp, synthetic construct
  source 1..20: mol_type = other DNA
tgaatttgattacatcctca

SEQ ID NO: 1091 - DNA, 20 bp, synthetic construct
  source 1..20: mol_type = other DNA
caatacctgtttattactaa

SEQ ID NO: 1092 - DNA, 20 bp, synthetic construct
  source 1..20: mol_type = other DNA
ctatgagctcttagagacac

SEQ ID NO: 1093 - DNA, 20 bp, synthetic construct
  source 1..20: mol_type = other DNA
tgggaaaacacatgttataa

SEQ ID NO: 1094 - DNA, 20 bp, synthetic construct
  source 1..20: mol_type = other DNA
ttgagatattatgttatttc

SEQ ID NO: 1095 - DNA, 20 bp, synthetic construct
  source 1..20: mol_type = other DNA
tcaatttttccaacatgacc

SEQ ID NO: 1096 - DNA, 20 bp, synthetic construct
  source 1..20: mol_type = other DNA
aaagggcttttatgtcagca

SEQ ID NO: 1097 - DNA, 20 bp, synthetic construct
  source 1..20: mol_type = other DNA
gtttatgtttctactaacat

SEQ ID NO: 1098 - DNA, 20 bp, synthetic construct
  source 1..20: mol_type = other DNA
aaaattatttttcatctcct

SEQ ID NO: 1099 - DNA, 20 bp, synthetic construct
  source 1..20: mol_type = other DNA
tcagaaaccccttaccttta

SEQ ID NO: 1100 - DNA, 20 bp, synthetic construct
  source 1..20: mol_type = other DNA
atataattcaccatatacca

SEQ ID NO: 1101 - DNA, 20 bp, synthetic construct
  source 1..20: mol_type = other DNA
gctccaaatcatcactgtgt

SEQ ID NO: 1102 - DNA, 20 bp, synthetic construct
  source 1..20: mol_type = other DNA
aagagcagagacctatgaca

SEQ ID NO: 1103 - DNA, 20 bp, synthetic construct
  source 1..20: mol_type = other DNA
ttcatcaaatcaaaaatctc

SEQ ID NO: 1104 - DNA, 20 bp, synthetic construct
  source 1..20: mol_type = other DNA
aacagatcaaacatccagaa

SEQ ID NO: 1105 - DNA, 20 bp, synthetic construct
  source 1..20: mol_type = other DNA
aatgacttttagttcattat

SEQ ID NO: 1106 - DNA, 20 bp, synthetic construct
  source 1..20: mol_type = other DNA
ctgtaaaaatcatctttaat

SEQ ID NO: 1107 - DNA, 20 bp, synthetic construct
  source 1..20: mol_type = other DNA
cgcttgaacacttgcatcag

SEQ ID NO: 1108 - DNA, 20 bp, synthetic construct
  source 1..20: mol_type = other DNA
ccccagtgttccatcctcca

SEQ ID NO: 1109 - DNA, 20 bp, synthetic construct
  source 1..20: mol_type = other DNA
agccaccaccatgaggctgc

SEQ ID NO: 1110 - DNA, 20 bp, synthetic construct
  source 1..20: mol_type = other DNA
agttctcccccttggtggtt

SEQ ID NO: 1111 - DNA, 20 bp, synthetic construct
  source 1..20: mol_type = other DNA
aaagagtgagacaccaccac

SEQ ID NO: 1112 - DNA, 20 bp, synthetic construct
  source 1..20: mol_type = other DNA
aaataagtccagattaacca

SEQ ID NO: 1113 - DNA, 20 bp, synthetic construct
  source 1..20: mol_type = other DNA
aatggaaaatatctctaaat

SEQ ID NO: 1114 - DNA, 20 bp, synthetic construct
  source 1..20: mol_type = other DNA
gagctaagaatctctaggat

SEQ ID NO: 1115 - DNA, 20 bp, synthetic construct
  source 1..20: mol_type = other DNA
ttgtgacaatatttactctt

SEQ ID NO: 1116 - DNA, 20 bp, synthetic construct
  source 1..20: mol_type = other DNA
cagttatgttcactgtgaat

SEQ ID NO: 1117 - DNA, 20 bp, synthetic construct
  source 1..20: mol_type = other DNA
ttgatttcaagtcccagaag

SEQ ID NO: 1118 - DNA, 20 bp, synthetic construct
  source 1..20: mol_type = other DNA
atgggaggttgcctccaagg

SEQ ID NO: 1119 - DNA, 20 bp, synthetic construct
  source 1..20: mol_type = other DNA
gcaatttacttttcagctgc

SEQ ID NO: 1120 - DNA, 20 bp, synthetic construct
  source 1..20: mol_type = other DNA
tggtttccaggtaaatggac

SEQ ID NO: 1121 - DNA, 20 bp, synthetic construct
  source 1..20: mol_type = other DNA
gctttcacaactgcagctct

SEQ ID NO: 1122 - DNA, 20 bp, synthetic construct
  source 1..20: mol_type = other DNA
tttaattacatcatcctcta

SEQ ID NO: 1123 - DNA, 20 bp, synthetic construct
  source 1..20: mol_type = other DNA
gttcttttctttgcacactg

SEQ ID NO: 1124 - DNA, 20 bp, synthetic construct
  source 1..20: mol_type = other DNA
cttgacctaattctggtttt

SEQ ID NO: 1125 - DNA, 20 bp, synthetic construct
  source 1..20: mol_type = other DNA
ctattctttgattcaaaagc

SEQ ID NO: 1126 - DNA, 20 bp, synthetic construct
  source 1..20: mol_type = other DNA
cctaagatattttttagatt

SEQ ID NO: 1127 - DNA, 20 bp, synthetic construct
  source 1..20: mol_type = other DNA
tcaaatcaatcatatttctg

SEQ ID NO: 1128 - DNA, 20 bp, synthetic construct
  source 1..20: mol_type = other DNA
actttaattaacattaacag

SEQ ID NO: 1129 - DNA, 20 bp, synthetic construct
  source 1..20: mol_type = other DNA
gctaggtgacaatatcaaac

SEQ ID NO: 1130 - DNA, 20 bp, synthetic construct
  source 1..20: mol_type = other DNA
acatagaatactcacaaagt

SEQ ID NO: 1131 - DNA, 20 bp, synthetic construct
  source 1..20: mol_type = other DNA
aaaagttaatgcattagaca

SEQ ID NO: 1132 - DNA, 20 bp, synthetic construct
  source 1..20: mol_type = other DNA
taatggtgtccactttggat

SEQ ID NO: 1133 - DNA, 20 bp, synthetic construct
  source 1..20: mol_type = other DNA
agatattaaacatttacaat

SEQ ID NO: 1134 - DNA, 20 bp, synthetic construct
  source 1..20: mol_type = other DNA
aactgctaattaaaccgtga

SEQ ID NO: 1135 - DNA, 20 bp, synthetic construct
  source 1..20: mol_type = other DNA
aaaaatccttaatcctattc

SEQ ID NO: 1136 - DNA, 20 bp, synthetic construct
  source 1..20: mol_type = other DNA
catatttatccaattccctg

SEQ ID NO: 1137 - DNA, 20 bp, synthetic construct
  source 1..20: mol_type = other DNA
ttcctttcttctacaaatct

SEQ ID NO: 1138 - DNA, 20 bp, synthetic construct
  source 1..20: mol_type = other DNA
ctgtaagaccttctctgtgt

SEQ ID NO: 1139 - DNA, 20 bp, synthetic construct
  source 1..20: mol_type = other DNA
acatacaaatcacatcctac

SEQ ID NO: 1140 - DNA, 20 bp, synthetic construct
  source 1..20: mol_type = other DNA
ttataatcttaatattttcc

SEQ ID NO: 1141 - DNA, 20 bp, synthetic construct
  source 1..20: mol_type = other DNA
gtgtaaatgactcatcattt

SEQ ID NO: 1142 - DNA, 20 bp, synthetic construct
  source 1..20: mol_type = other DNA
tactattaattattttggtt

SEQ ID NO: 1143 - DNA, 20 bp, synthetic construct
  source 1..20: mol_type = other DNA
tagctatcatttcctccatt

SEQ ID NO: 1144 - DNA, 20 bp, synthetic construct
  source 1..20: mol_type = other DNA
cagattgcttaacaaaatgt

SEQ ID NO: 1145 - DNA, 20 bp, synthetic construct
  source 1..20: mol_type = other DNA
aggtgttctaattttagatc

SEQ ID NO: 1146 - DNA, 20 bp, synthetic construct
  source 1..20: mol_type = other DNA
acataatgttcatttcagtt

SEQ ID NO: 1147 - DNA, 20 bp, synthetic construct
  source 1..20: mol_type = other DNA
ttgtcagtttttccccacat

SEQ ID NO: 1148 - DNA, 20 bp, synthetic construct
  source 1..20: mol_type = other DNA
ttcctttcagatttttcaca

SEQ ID NO: 1149 - DNA, 20 bp, synthetic construct
  source 1..20: mol_type = other DNA
ctgtgggtccatttcatcta

SEQ ID NO: 1150 - DNA, 20 bp, synthetic construct
  source 1..20: mol_type = other DNA
ggatatgtacaatctgttgt

SEQ ID NO: 1151 - DNA, 20 bp, synthetic construct
  source 1..20: mol_type = other DNA
aaatgatgatgcaatgaggt

SEQ ID NO: 1152 - DNA, 20 bp, synthetic construct
  source 1..20: mol_type = other DNA
aatggctgctcccttacata

SEQ ID NO: 1153 - DNA, 20 bp, synthetic construct
  source 1..20: mol_type = other DNA
agagaatctttcaccttggt

SEQ ID NO: 1154 - DNA, 20 bp, synthetic construct
  source 1..20: mol_type = other DNA
tcgacaaaaaaaattctcct

SEQ ID NO: 1155 - DNA, 20 bp, synthetic construct
  source 1..20: mol_type = other DNA
ctaatcttcaacatttataa

SEQ ID NO: 1156 - DNA, 20 bp, synthetic construct
  source 1..20: mol_type = other DNA
ccataaaacacattacaact

SEQ ID NO: 1157 - DNA, 20 bp, synthetic construct
  source 1..20: mol_type = other DNA
tttatttctttcctgatagt

SEQ ID NO: 1158 - DNA, 20 bp, synthetic construct
  source 1..20: mol_type = other DNA
taacaacattaattatcccc

SEQ ID NO: 1159 - DNA, 20 bp, synthetic construct
  source 1..20: mol_type = other DNA
agaagcattgtacctcaaca

SEQ ID NO: 1160 - DNA, 20 bp, synthetic construct
  source 1..20: mol_type = other DNA
tatcaagttttttttctaag

SEQ ID NO: 1161 - DNA, 20 bp, synthetic construct
  source 1..20: mol_type = other DNA
cagcaaataatctacaaagt

SEQ ID NO: 1162 - DNA, 20 bp, synthetic construct
  source 1..20: mol_type = other DNA
tctataaattcatctaggta

SEQ ID NO: 1163 - DNA, 20 bp, synthetic construct
  source 1..20: mol_type = other DNA
tggttgaaaatcaggagctc

SEQ ID NO: 1164 - DNA, 20 bp, synthetic construct
  source 1..20: mol_type = other DNA
gtctacaaaacattttttct

SEQ ID NO: 1165 - DNA, 20 bp, synthetic construct
  source 1..20: mol_type = other DNA
tagcttaacacacatttcaa

SEQ ID NO: 1166 - DNA, 20 bp, synthetic construct
  source 1..20: mol_type = other DNA
cagccagtatgtgtcagctt

SEQ ID NO: 1167 - DNA, 20 bp, synthetic construct
  source 1..20: mol_type = other DNA
gatgaatttgattacatcct

SEQ ID NO: 1168 - DNA, 20 bp, synthetic construct
  source 1..20: mol_type = other DNA
gtcaatacctgtttattact

SEQ ID NO: 1169 - DNA, 20 bp, synthetic construct
  source 1..20: mol_type = other DNA
atctatgagctcttagagac

SEQ ID NO: 1170 - DNA, 20 bp, synthetic construct
  source 1..20: mol_type = other DNA
gaatgggaaaacacatgtta

SEQ ID NO: 1171 - DNA, 20 bp, synthetic construct
  source 1..20: mol_type = other DNA
cttgagatattatgttattt

SEQ ID NO: 1172 - DNA, 20 bp, synthetic construct
  source 1..20: mol_type = other DNA
ctcaatttttccaacatgac

SEQ ID NO: 1173 - DNA, 20 bp, synthetic construct
  source 1..20: mol_type = other DNA
tctaaagggcttttatgtca

SEQ ID NO: 1174 - DNA, 20 bp, synthetic construct
  source 1..20: mol_type = other DNA
tgtttatgtttctactaaca

SEQ ID NO: 1175 - DNA, 20 bp, synthetic construct
  source 1..20: mol_type = other DNA
gaaaattatttttcatctcc

SEQ ID NO: 1176 - DNA, 20 bp, synthetic construct
  source 1..20: mol_type = other DNA
ctcagaaaccccttaccttt

SEQ ID NO: 1177 - DNA, 20 bp, synthetic construct
  source 1..20: mol_type = other DNA
catataattcaccatatacc

SEQ ID NO: 1178 - DNA, 20 bp, synthetic construct
  source 1..20: mol_type = other DNA
ggctccaaatcatcactgtg

SEQ ID NO: 1179 - DNA, 20 bp, synthetic construct
  source 1..20: mol_type = other DNA
cacttagctccaagagcaga

SEQ ID NO: 1180 - DNA, 20 bp, synthetic construct
  source 1..20: mol_type = other DNA
cattcatcaaatcaaaaatc

SEQ ID NO: 1181 - DNA, 20 bp, synthetic construct
  source 1..20: mol_type = other DNA
aaacagatcaaacatccaga

SEQ ID NO: 1182 - DNA, 20 bp, synthetic construct
  source 1..20: mol_type = other DNA
gaatgacttttagttcatta

SEQ ID NO: 1183 - DNA, 20 bp, synthetic construct
  source 1..20: mol_type = other DNA
actgtaaaaatcatctttaa

SEQ ID NO: 1184 - DNA, 20 bp, synthetic construct
  source 1..20: mol_type = other DNA
tcgcttgaacacttgcatca

SEQ ID NO: 1185 - DNA, 20 bp, synthetic construct
  source 1..20: mol_type = other DNA
tcggctgcccccagtgttcc

SEQ ID NO: 1186 - DNA, 20 bp, synthetic construct
  source 1..20: mol_type = other DNA
cagccaccaccatgaggctg

SEQ ID NO: 1187 - DNA, 20 bp, synthetic construct
  source 1..20: mol_type = other DNA
tgaagttctcccccttggtg

SEQ ID NO: 1188 - DNA, 20 bp, synthetic construct
  source 1..20: mol_type = other DNA
tgattagcctatccgggaca

SEQ ID NO: 1189 - DNA, 20 bp, synthetic construct
  source 1..20: mol_type = other DNA
gtccaaaaataagtccagat

SEQ ID NO: 1190 - DNA, 20 bp, synthetic construct
  source 1..20: mol_type = other DNA
ttaaaatggaaaatatctct

SEQ ID NO: 1191 - DNA, 20 bp, synthetic construct
  source 1..20: mol_type = other DNA
agagctaagaatctctagga

SEQ ID NO: 1192 - DNA, 20 bp, synthetic construct
  source 1..20: mol_type = other DNA
gttgtgacaatatttactct

SEQ ID NO: 1193 - DNA, 20 bp, synthetic construct
  source 1..20: mol_type = other DNA
tacagttatgttcactgtga

SEQ ID NO: 1194 - DNA, 20 bp, synthetic construct
  source 1..20: mol_type = other DNA
tttgatttcaagtcccagaa

SEQ ID NO: 1195 - DNA, 20 bp, synthetic construct
  source 1..20: mol_type = other DNA
tttaaacatctaaaatggga

SEQ ID NO: 1196 - DNA, 20 bp, synthetic construct
  source 1..20: mol_type = other DNA
ggcaatttacttttcagctg

SEQ ID NO: 1197 - DNA, 20 bp, synthetic construct
  source 1..20: mol_type = other DNA
tcattctggtttccaggtaa

SEQ ID NO: 1198 - DNA, 20 bp, synthetic construct
  source 1..20: mol_type = other DNA
tgctttcacaactgcagctc

SEQ ID NO: 1199 - DNA, 20 bp, synthetic construct
  source 1..20: mol_type = other DNA
ttttaattacatcatcctct

SEQ ID NO: 1200 - DNA, 20 bp, synthetic construct
  source 1..20: mol_type = other DNA
agttcttttctttgcacact

SEQ ID NO: 1201 - DNA, 20 bp, synthetic construct
  source 1..20: mol_type = other DNA
acttgacctaattctggttt

SEQ ID NO: 1202 - DNA, 20 bp, synthetic construct
  source 1..20: mol_type = other DNA
cctattctttgattcaaaag

SEQ ID NO: 1203 - DNA, 20 bp, synthetic construct
  source 1..20: mol_type = other DNA
acctaagatattttttagat

SEQ ID NO: 1204 - DNA, 20 bp, synthetic construct
  source 1..20: mol_type = other DNA
ttcaaatcaatcatatttct

SEQ ID NO: 1205 - DNA, 20 bp, synthetic construct
  source 1..20: mol_type = other DNA
tactttaattaacattaaca

SEQ ID NO: 1206 - DNA, 20 bp, synthetic construct
  source 1..20: mol_type = other DNA
tgctaggtgacaatatcaaa

SEQ ID NO: 1207 - DNA, 20 bp, synthetic construct
  source 1..20: mol_type = other DNA
ttacatagaatactcacaaa

SEQ ID NO: 1208 - DNA, 20 bp, synthetic construct
  source 1..20: mol_type = other DNA
cttacaaaagttaatgcatt

SEQ ID NO: 1209 - DNA, 20 bp, synthetic construct
  source 1..20: mol_type = other DNA
catgcatatttcaaagacct

SEQ ID NO: 1210 - DNA, 20 bp, synthetic construct
  source 1..20: mol_type = other DNA
cagatattaaacatttacaa

SEQ ID NO: 1211 - DNA, 20 bp, synthetic construct
  source 1..20: mol_type = other DNA
gaactgctaattaaaccgtg

SEQ ID NO: 1212 - DNA, 20 bp, synthetic construct
  source 1..20: mol_type = other DNA
gtaaaaatccttaatcctat

SEQ ID NO: 1213 - DNA, 20 bp, synthetic construct
  source 1..20: mol_type = other DNA
acatatttatccaattccct

SEQ ID NO: 1214 - DNA, 20 bp, synthetic construct
  source 1..20: mol_type = other DNA
tttttcctttcttctacaaa

SEQ ID NO: 1215 - DNA, 20 bp, synthetic construct
  source 1..20: mol_type = other DNA
actgtaagaccttctctgtg

SEQ ID NO: 1216 - DNA, 20 bp, synthetic construct
  source 1..20: mol_type = other DNA
aacatacaaatcacatccta

SEQ ID NO: 1217 - DNA, 20 bp, synthetic construct
  source 1..20: mol_type = other DNA
ctattataatcttaatattt

SEQ ID NO: 1218 - DNA, 20 bp, synthetic construct
  source 1..20: mol_type = other DNA
ttgtgtaaatgactcatcat

SEQ ID NO: 1219 - DNA, 20 bp, synthetic construct
  source 1..20: mol_type = other DNA
ttactattaattattttggt

SEQ ID NO: 1220 - DNA, 20 bp, synthetic construct
  source 1..20: mol_type = other DNA
agtagctatcatttcctcca

SEQ ID NO: 1221 - DNA, 20 bp, synthetic construct
  source 1..20: mol_type = other DNA
tcaccagattgcttaacaaa

SEQ ID NO: 1222 - DNA, 20 bp, synthetic construct
  source 1..20: mol_type = other DNA
caggtgttctaattttagat

SEQ ID NO: 1223 - DNA, 20 bp, synthetic construct
  source 1..20: mol_type = other DNA
tacataatgttcatttcagt

SEQ ID NO: 1224 - DNA, 20 bp, synthetic construct
  source 1..20: mol_type = other DNA
cttgtcagtttttccccaca

SEQ ID NO: 1225 - DNA, 20 bp, synthetic construct
  source 1..20: mol_type = other DNA
gcttttcctttcagattttt

SEQ ID NO: 1226 - DNA, 20 bp, synthetic construct
  source 1..20: mol_type = other DNA
actgtgggtccatttcatct

SEQ ID NO: 1227 - DNA, 20 bp, synthetic construct
  source 1..20: mol_type = other DNA
caggatatgtacaatctgtt

SEQ ID NO: 1228 - DNA, 20 bp, synthetic construct
  source 1..20: mol_type = other DNA
gctgattttacaagaaatga

SEQ ID NO: 1229 - DNA, 20 bp, synthetic construct
  source 1..20: mol_type = other DNA
ttgattacattatttttaaa

SEQ ID NO: 1230 - DNA, 20 bp, synthetic construct
  source 1..20: mol_type = other DNA
ttcagagaatctttcacctt

SEQ ID NO: 1231 - DNA, 20 bp, synthetic construct
  source 1..20: mol_type = other DNA
atggttaacacatcgacaaa

SEQ ID NO: 1232 - DNA, 20 bp, synthetic construct
  source 1..20: mol_type = other DNA
ggtctaatcttcaacattta

SEQ ID NO: 1233 - DNA, 20 bp, synthetic construct
  source 1..20: mol_type = other DNA
gcccataaaacacattacaa

SEQ ID NO: 1234 - DNA, 20 bp, synthetic construct
  source 1..20: mol_type = other DNA
ctttttatttctttcctgat

SEQ ID NO: 1235 - DNA, 20 bp, synthetic construct
  source 1..20: mol_type = other DNA
ttaacaacattaattatccc

SEQ ID NO: 1236 - DNA, 20 bp, synthetic construct
  source 1..20: mol_type = other DNA
tgtagaagcattgtacctca

SEQ ID NO: 1237 - DNA, 20 bp, synthetic construct
  source 1..20: mol_type = other DNA
gtatcaagttttttttctaa

SEQ ID NO: 1238 - DNA, 20 bp, synthetic construct
  source 1..20: mol_type = other DNA
ccagcaaataatctacaaag

SEQ ID NO: 1239 - DNA, 20 bp, synthetic construct
  source 1..20: mol_type = other DNA
tgttctataaattcatctag

SEQ ID NO: 1240 - DNA, 20 bp, synthetic construct
  source 1..20: mol_type = other DNA
agaatggttgaaaatcagga

SEQ ID NO: 1241 - DNA, 20 bp, synthetic construct
  source 1..20: mol_type = other DNA
atcatagaatgttttttcaa

SEQ ID NO: 1242 - DNA, 20 bp, synthetic construct
  source 1..20: mol_type = other DNA
ttagcttaacacacatttca

SEQ ID NO: 1243 - DNA, 20 bp, synthetic construct
  source 1..20: mol_type = other DNA
ttgttgtttcttttctggta

SEQ ID NO: 1244 - DNA, 20 bp, synthetic construct
  source 1..20: mol_type = other DNA
ggaagaactttttaaacaaa

SEQ ID NO: 1245 - DNA, 20 bp, synthetic construct
  source 1..20: mol_type = other DNA
tggtcaatacctgtttatta

SEQ ID NO: 1246 - DNA, 20 bp, synthetic construct
  source 1..20: mol_type = other DNA
ttgaatgtgcctcatttaaa

SEQ ID NO: 1247 - DNA, 20 bp, synthetic construct
  source 1..20: mol_type = other DNA
tgaatgggaaaacacatgtt

SEQ ID NO: 1248 - DNA, 20 bp, synthetic construct
  source 1..20: mol_type = other DNA
acttgagatattatgttatt

SEQ ID NO: 1249 - DNA, 20 bp, synthetic construct
  source 1..20: mol_type = other DNA
cttctcaatttttccaacat

SEQ ID NO: 1250 - DNA, 20 bp, synthetic construct
  source 1..20: mol_type = other DNA
tcagtagctttcagtctaaa

SEQ ID NO: 1251 - DNA, 20 bp, synthetic construct
  source 1..20: mol_type = other DNA
ctgtttatgtttctactaac

SEQ ID NO: 1252 - DNA, 20 bp, synthetic construct
  source 1..20: mol_type = other DNA
tagaaaattatttttcatct

SEQ ID NO: 1253 - DNA, 20 bp, synthetic construct
  source 1..20: mol_type = other DNA
actcagaaaccccttacctt

SEQ ID NO: 1254 - DNA, 20 bp, synthetic construct
  source 1..20: mol_type = other DNA
ccatataattcaccatatac

SEQ ID NO: 1255 - DNA, 20 bp, synthetic construct
  source 1..20: mol_type = other DNA
taggctccaaatcatcactg

SEQ ID NO: 1256 - DNA, 20 bp, synthetic construct
  source 1..20: mol_type = other DNA
ctgggcacttagctccaaga

SEQ ID NO: 1257 - DNA, 20 bp, synthetic construct
  source 1..20: mol_type = other DNA
acattcatcaaatcaaaaat

SEQ ID NO: 1258 - DNA, 20 bp, synthetic construct
  source 1..20: mol_type = other DNA
caaacagatcaaacatccag

SEQ ID NO: 1259 - DNA, 20 bp, synthetic construct
  source 1..20: mol_type = other DNA
tgaatgacttttagttcatt

SEQ ID NO: 1260 - DNA, 20 bp, synthetic construct
  source 1..20: mol_type = other DNA
gactgtaaaaatcatcttta

SEQ ID NO: 1261 - DNA, 20 bp, synthetic construct
  source 1..20: mol_type = other DNA
attcgcttgaacacttgcat

SEQ ID NO: 1262 - DNA, 20 bp, synthetic construct
  source 1..20: mol_type = other DNA
cccccagccaccaccgccct

SEQ ID NO: 1263 - DNA, 20 bp, synthetic construct
  source 1..20: mol_type = other DNA
ctgtccccagccaccaccat

SEQ ID NO: 1264 - DNA, 20 bp, synthetic construct
  source 1..20: mol_type = other DNA
acgcgctccatcatcttaac

SEQ ID NO: 1265 - DNA, 20 bp, synthetic construct
  source 1..20: mol_type = other DNA
ttgattagcctatccgggac

SEQ ID NO: 1266 - DNA, 20 bp, synthetic construct
  source 1..20: mol_type = other DNA
taagtccaaaaataagtcca

SEQ ID NO: 1267 - DNA, 20 bp, synthetic construct
  source 1..20: mol_type = other DNA
cttaaaatggaaaatatctc

SEQ ID NO: 1268 - DNA, 20 bp, synthetic construct
  source 1..20: mol_type = other DNA
atcaccccagttctcggtac

SEQ ID NO: 1269 - DNA, 20 bp, synthetic construct
  source 1..20: mol_type = other DNA
tgttgtgacaatatttactc

SEQ ID NO: 1270 - DNA, 20 bp, synthetic construct
  source 1..20: mol_type = other DNA
ttacagttatgttcactgtg

SEQ ID NO: 1271 - DNA, 20 bp, synthetic construct
  source 1..20: mol_type = other DNA
atttgatttcaagtcccaga

SEQ ID NO: 1272 - DNA, 20 bp, synthetic construct
  source 1..20: mol_type = other DNA
gtcctttaaacatctaaaat

SEQ ID NO: 1273 - DNA, 20 bp, synthetic construct
  source 1..20: mol_type = other DNA
aggcaatttacttttcagct

SEQ ID NO: 1274 - DNA, 20 bp, synthetic construct
  source 1..20: mol_type = other DNA
atcattctggtttccaggta

SEQ ID NO: 1275 - DNA, 20 bp, synthetic construct
  source 1..20: mol_type = other DNA
gtgctttcacaactgcagct

SEQ ID NO: 1276 - DNA, 20 bp, synthetic construct
  source 1..20: mol_type = other DNA
tttttaattacatcatcctc

SEQ ID NO: 1277 - DNA, 20 bp, synthetic construct
  source 1..20: mol_type = other DNA
cagttcttttctttgcacac

SEQ ID NO: 1278 - DNA, 20 bp, synthetic construct
  source 1..20: mol_type = other DNA
aacttgacctaattctggtt

SEQ ID NO: 1279 - DNA, 20 bp, synthetic construct
  source 1..20: mol_type = other DNA
ccctattctttgattcaaaa

SEQ ID NO: 1280 - DNA, 20 bp, synthetic construct
  source 1..20: mol_type = other DNA
tctccaacctaagatatttt

SEQ ID NO: 1281 - DNA, 20 bp, synthetic construct
  source 1..20: mol_type = other DNA
cttcaaatcaatcatatttc

SEQ ID NO: 1282 - DNA, 20 bp, synthetic construct
  source 1..20: mol_type = other DNA
ttactttaattaacattaac

SEQ ID NO: 1283 - DNA, 20 bp, synthetic construct
  source 1..20: mol_type = other DNA
ctgctaggtgacaatatcaa

SEQ ID NO: 1284 - DNA, 20 bp, synthetic construct
  source 1..20: mol_type = other DNA
ttttacatagaatactcaca

SEQ ID NO: 1285 - DNA, 20 bp, synthetic construct
  source 1..20: mol_type = other DNA
taccttacaaaagttaatgc

SEQ ID NO: 1286 - DNA, 20 bp, synthetic construct
  source 1..20: mol_type = other DNA
acatgcatatttcaaagacc

SEQ ID NO: 1287 - DNA, 20 bp, synthetic construct
  source 1..20: mol_type = other DNA
tcagatattaaacatttaca

SEQ ID NO: 1288 - DNA, 20 bp, synthetic construct
  source 1..20: mol_type = other DNA
aaacacttcaaatcatatgg

SEQ ID NO: 1289 - DNA, 20 bp, synthetic construct
  source 1..20: mol_type = other DNA
tgtaaaaatccttaatccta

SEQ ID NO: 1290 - DNA, 20 bp, synthetic construct
  source 1..20: mol_type = other DNA
aacatatttatccaattccc

SEQ ID NO: 1291 - DNA, 20 bp, synthetic construct
  source 1..20: mol_type = other DNA
gattttttcctttcttctac

SEQ ID NO: 1292 - DNA, 20 bp, synthetic construct
  source 1..20: mol_type = other DNA
ttcactgtaagaccttctct

SEQ ID NO: 1293 - DNA, 20 bp, synthetic construct
  source 1..20: mol_type = other DNA
taacatacaaatcacatcct

SEQ ID NO: 1294 - DNA, 20 bp, synthetic construct
  source 1..20: mol_type = other DNA
tctattataatcttaatatt

SEQ ID NO: 1295 - DNA, 20 bp, synthetic construct
  source 1..20: mol_type = other DNA
ttttattgtgtaaatgactc

SEQ ID NO: 1296 - DNA, 20 bp, synthetic construct
  source 1..20: mol_type = other DNA
gctgttactattaattattt

SEQ ID NO: 1297 - DNA, 20 bp, synthetic construct
  source 1..20: mol_type = other DNA
aagtagctatcatttcctcc

SEQ ID NO: 1298 - DNA, 20 bp, synthetic construct
  source 1..20: mol_type = other DNA
atcaccagattgcttaacaa

SEQ ID NO: 1299 - DNA, 20 bp, synthetic construct
  source 1..20: mol_type = other DNA
tttccaggtgttctaatttt

SEQ ID NO: 1300 - DNA, 20 bp, synthetic construct
  source 1..20: mol_type = other DNA
gttacataatgttcatttca

SEQ ID NO: 1301 - DNA, 20 bp, synthetic construct
  source 1..20: mol_type = other DNA
acttgtcagtttttccccac

SEQ ID NO: 1302 - DNA, 20 bp, synthetic construct
  source 1..20: mol_type = other DNA
tgtgcttttcctttcagatt

SEQ ID NO: 1303 - DNA, 20 bp, synthetic construct
  source 1..20: mol_type = other DNA
cctttctcttacagaaaact

SEQ ID NO: 1304 - DNA, 20 bp, synthetic construct
  source 1..20: mol_type = other DNA
ctttcaaccttcctaagacc

SEQ ID NO: 1305 - DNA, 20 bp, synthetic construct
  source 1..20: mol_type = other DNA
aagctgattttacaagaaat

SEQ ID NO: 1306 - DNA, 20 bp, synthetic construct
  source 1..20: mol_type = other DNA
atttgattacattattttta

SEQ ID NO: 1307 - DNA, 20 bp, synthetic construct
  source 1..20: mol_type = other DNA
gttcagagaatctttcacct

SEQ ID NO: 1308 - DNA, 20 bp, synthetic construct
  source 1..20: mol_type = other DNA
aatggttaacacatcgacaa

SEQ ID NO: 1309 - DNA, 20 bp, synthetic construct
  source 1..20: mol_type = other DNA
caggcttcagtgctaggtcc

SEQ ID NO: 1310 - DNA, 20 bp, synthetic construct
  source 1..20: mol_type = other DNA
gagatccaaatataggcact

SEQ ID NO: 1311 - DNA, 20 bp, synthetic construct
  source 1..20: mol_type = other DNA
tggcactttctttttatttc

SEQ ID NO: 1312 - DNA, 20 bp, synthetic construct
  source 1..20: mol_type = other DNA
ttctatggaatctgtaggtc

SEQ ID NO: 1313 - DNA, 20 bp, synthetic construct
  source 1..20: mol_type = other DNA
gagacaataaccatacgatc

SEQ ID NO: 1314 - DNA, 20 bp, synthetic construct
  source 1..20: mol_type = other DNA
catggagcatgctccaagac

SEQ ID NO: 1315 - DNA, 20 bp, synthetic construct
  source 1..20: mol_type = other DNA
gtcaccagcaaataatctac

SEQ ID NO: 1316 - DNA, 20 bp, synthetic construct
  source 1..20: mol_type = other DNA
ttgttctataaattcatcta

SEQ ID NO: 1317 - DNA, 20 bp, synthetic construct
  source 1..20: mol_type = other DNA
aagaagaatacattatgacc

SEQ ID NO: 1318 - DNA, 20 bp, synthetic construct
  source 1..20: mol_type = other DNA
acatcatagaatgttttttc

SEQ ID NO: 1319 - DNA, 20 bp, synthetic construct
  source 1..20: mol_type = other DNA
attagcttaacacacatttc

SEQ ID NO: 1320 - DNA, 20 bp, synthetic construct
  source 1..20: mol_type = other DNA
gttgttgtttcttttctggt

SEQ ID NO: 1321 - DNA, 20 bp, synthetic construct
  source 1..20: mol_type = other DNA
ggtgacacattatacagaga

SEQ ID NO: 1322 - DNA, 20 bp, synthetic construct
  source 1..20: mol_type = other DNA
atggtcaatacctgtttatt

SEQ ID NO: 1323 - DNA, 20 bp, synthetic construct
  source 1..20: mol_type = other DNA
aaacatttatttcatgtgcc

SEQ ID NO: 1324 - DNA, 20 bp, synthetic construct
  source 1..20: mol_type = other DNA
atgaatgggaaaacacatgt

SEQ ID NO: 1325 - DNA, 20 bp, synthetic construct
  source 1..20: mol_type = other DNA
ctacttgagatattatgtta

SEQ ID NO: 1326 - DNA, 20 bp, synthetic construct
  source 1..20: mol_type = other DNA
agcttctcaatttttccaac

SEQ ID NO: 1327 - DNA, 20 bp, synthetic construct
  source 1..20: mol_type = other DNA
agtcagtagctttcagtcta

SEQ ID NO: 1328 - DNA, 20 bp, synthetic construct
  source 1..20: mol_type = other DNA
tcctgtttatgtttctacta

SEQ ID NO: 1329 - DNA, 20 bp, synthetic construct
  source 1..20: mol_type = other DNA
tgcaaatttttctaaaaatt

SEQ ID NO: 1330 - DNA, 20 bp, synthetic construct
  source 1..20: mol_type = other DNA
gaactcagaaaccccttacc

SEQ ID NO: 1331 - DNA, 20 bp, synthetic construct
  source 1..20: mol_type = other DNA
accatataattcaccatata

SEQ ID NO: 1332 - DNA, 20 bp, synthetic construct
  source 1..20: mol_type = other DNA
cataggctccaaatcatcac

SEQ ID NO: 1333 - DNA, 20 bp, synthetic construct
  source 1..20: mol_type = other DNA
tctcatttaccctgggcact

SEQ ID NO: 1334 - DNA, 20 bp, synthetic construct
  source 1..20: mol_type = other DNA
gtacattcatcaaatcaaaa

SEQ ID NO: 1335 - DNA, 20 bp, synthetic construct
  source 1..20: mol_type = other DNA
acaaacagatcaaacatcca

SEQ ID NO: 1336 - DNA, 20 bp, synthetic construct
  source 1..20: mol_type = other DNA
gatgaatgacttttagttca

SEQ ID NO: 1337 - DNA, 20 bp, synthetic construct
  source 1..20: mol_type = other DNA
tgactgtaaaaatcatcttt

SEQ ID NO: 1338 - DNA, 20 bp, synthetic construct
  source 1..20: mol_type = other DNA
agattcgcttgaacacttgc

SEQ ID NO: 1339 - DNA, 20 bp, synthetic construct
  source 1..20: mol_type = other DNA
gcccccagccaccaccgccc

SEQ ID NO: 1340 - DNA, 20 bp, synthetic construct
  source 1..20: mol_type = other DNA
ccagccaccaccatgaggct

SEQ ID NO: 1341 - DNA, 20 bp, synthetic construct
  source 1..20: mol_type = other DNA
cacgcgctccatcatcttaa

SEQ ID NO: 1342 - DNA, 20 bp, synthetic construct
  source 1..20: mol_type = other DNA
attgattagcctatccggga

SEQ ID NO: 1343 - DNA, 20 bp, synthetic construct
  source 1..20: mol_type = other DNA
actaagtccaaaaataagtc

SEQ ID NO: 1344 - DNA, 20 bp, synthetic construct
  source 1..20: mol_type = other DNA
gttttcttaaaatggaaaat

SEQ ID NO: 1345 - DNA, 20 bp, synthetic construct
  source 1..20: mol_type = other DNA
agtaaaacatcaccccagtt

SEQ ID NO: 1346 - DNA, 20 bp, synthetic construct
  source 1..20: mol_type = other DNA
gtgttgtgacaatatttact

SEQ ID NO: 1347 - DNA, 20 bp, synthetic construct
  source 1..20: mol_type = other DNA
gttacagttatgttcactgt

SEQ ID NO: 1348 - DNA, 20 bp, synthetic construct
  source 1..20: mol_type = other DNA
catttgatttcaagtcccag

SEQ ID NO: 1349 - DNA, 20 bp, synthetic construct
  source 1..20: mol_type = other DNA
ggtcctttaaacatctaaaa

SEQ ID NO: 1350 - DNA, 20 bp, synthetic construct
  source 1..20: mol_type = other DNA
aaggcaatttacttttcagc

SEQ ID NO: 1351 - DNA, 20 bp, synthetic construct
  source 1..20: mol_type = other DNA
aatcattctggtttccaggt

SEQ ID NO: 1352 - DNA, 20 bp, synthetic construct
  source 1..20: mol_type = other DNA
tggtgctttcacaactgcag

SEQ ID NO: 1353 - DNA, 20 bp, synthetic construct
  source 1..20: mol_type = other DNA
ttttttaattacatcatcct

SEQ ID NO: 1354 - DNA, 20 bp, synthetic construct
  source 1..20: mol_type = other DNA
gcagttcttttctttgcaca

SEQ ID NO: 1355 - DNA, 20 bp, synthetic construct
  source 1..20: mol_type = other DNA
gaacttgacctaattctggt

SEQ ID NO: 1356 - DNA, 20 bp, synthetic construct
  source 1..20: mol_type = other DNA
tccctattctttgattcaaa

SEQ ID NO: 1357 - DNA, 20 bp, synthetic construct
  source 1..20: mol_type = other DNA
catctccaacctaagatatt

SEQ ID NO: 1358 - DNA, 20 bp, synthetic construct
  source 1..20: mol_type = other DNA
acttcaaatcaatcatattt

SEQ ID NO: 1359 - DNA, 20 bp, synthetic construct
  source 1..20: mol_type = other DNA
ttttactttaattaacatta

SEQ ID NO: 1360 - DNA, 20 bp, synthetic construct
  source 1..20: mol_type = other DNA
acatatctgctaggtgacaa

SEQ ID NO: 1361 - DNA, 20 bp, synthetic construct
  source 1..20: mol_type = other DNA
ctatgcaatatatattttat

SEQ ID NO: 1362 - DNA, 20 bp, synthetic construct
  source 1..20: mol_type = other DNA
cagtaccttacaaaagttaa

SEQ ID NO: 1363 - DNA, 20 bp, synthetic construct
  source 1..20: mol_type = other DNA
tacatgcatatttcaaagac

SEQ ID NO: 1364 - DNA, 20 bp, synthetic construct
  source 1..20: mol_type = other DNA
gtcagatattaaacatttac

SEQ ID NO: 1365 - DNA, 20 bp, synthetic construct
  source 1..20: mol_type = other DNA
gggaaacacttcaaatcata

SEQ ID NO: 1366 - DNA, 20 bp, synthetic construct
  source 1..20: mol_type = other DNA
ttgtaaaaatccttaatcct

SEQ ID NO: 1367 - DNA, 20 bp, synthetic construct
  source 1..20: mol_type = other DNA
taacatatttatccaattcc

SEQ ID NO: 1368 - DNA, 20 bp, synthetic construct
  source 1..20: mol_type = other DNA
gtgattttttcctttcttct

SEQ ID NO: 1369 - DNA, 20 bp, synthetic construct
  source 1..20: mol_type = other DNA
ctttttttcactgtaagacc

SEQ ID NO: 1370 - DNA, 20 bp, synthetic construct
  source 1..20: mol_type = other DNA
ataacatacaaatcacatcc

SEQ ID NO: 1371 - DNA, 20 bp, synthetic construct
  source 1..20: mol_type = other DNA
atctattataatcttaatat

SEQ ID NO: 1372 - DNA, 20 bp, synthetic construct
  source 1..20: mol_type = other DNA
atttgcattttattgtgtaa

SEQ ID NO: 1373 - DNA, 20 bp, synthetic construct
  source 1..20: mol_type = other DNA
tgctgttactattaattatt

SEQ ID NO: 1374 - DNA, 20 bp, synthetic construct
  source 1..20: mol_type = other DNA
aaagtagctatcatttcctc

SEQ ID NO: 1375 - DNA, 20 bp, synthetic construct
  source 1..20: mol_type = other DNA
tcttaatgcatcaccagatt

SEQ ID NO: 1376 - DNA, 20 bp, synthetic construct
  source 1..20: mol_type = other DNA
taggctcttttccaggtgtt

SEQ ID NO: 1377 - DNA, 20 bp, synthetic construct
  source 1..20: mol_type = other DNA
ggttacataatgttcatttc

SEQ ID NO: 1378 - DNA, 20 bp, synthetic construct
  source 1..20: mol_type = other DNA
tacttgtcagtttttcccca

SEQ ID NO: 1379 - DNA, 20 bp, synthetic construct
  source 1..20: mol_type = other DNA
tctgtgcttttcctttcaga

SEQ ID NO: 1380 - DNA, 20 bp, synthetic construct
  source 1..20: mol_type = other DNA
aacaatctctcctttctctt

SEQ ID NO: 1381 - DNA, 20 bp, synthetic construct
  source 1..20: mol_type = other DNA
actttcaaccttcctaagac

SEQ ID NO: 1382 - DNA, 20 bp, synthetic construct
  source 1..20: mol_type = other DNA
taagctgattttacaagaaa

SEQ ID NO: 1383 - DNA, 20 bp, synthetic construct
  source 1..20: mol_type = other DNA
gttatttgattacattattt

SEQ ID NO: 1384 - DNA, 20 bp, synthetic construct
  source 1..20: mol_type = other DNA
agttcagagaatctttcacc

SEQ ID NO: 1385 - DNA, 20 bp, synthetic construct
  source 1..20: mol_type = other DNA
gaatggttaacacatcgaca

SEQ ID NO: 1386 - DNA, 20 bp, synthetic construct
  source 1..20: mol_type = other DNA
ccgtgatcaggcttcagtgc

SEQ ID NO: 1387 - DNA, 20 bp, synthetic construct
  source 1..20: mol_type = other DNA
tgagatccaaatataggcac

SEQ ID NO: 1388 - DNA, 20 bp, synthetic construct
  source 1..20: mol_type = other DNA
aatggcactttctttttatt

SEQ ID NO: 1389 - DNA, 20 bp, synthetic construct
  source 1..20: mol_type = other DNA
atagggattctatggaatct

SEQ ID NO: 1390 - DNA, 20 bp, synthetic construct
  source 1..20: mol_type = other DNA
acagagtgagacaataacca

SEQ ID NO: 1391 - DNA, 20 bp, synthetic construct
  source 1..20: mol_type = other DNA
aatacaggacattccatcca

SEQ ID NO: 1392 - DNA, 20 bp, synthetic construct
  source 1..20: mol_type = other DNA
gcaagctacaaaattttact

SEQ ID NO: 1393 - DNA, 20 bp, synthetic construct
  source 1..20: mol_type = other DNA
ttgcttttatgctattaggt

SEQ ID NO: 1394 - DNA, 20 bp, synthetic construct
  source 1..20: mol_type = other DNA
caacttattttaacagttta

SEQ ID NO: 1395 - DNA, 20 bp, synthetic construct
  source 1..20: mol_type = other DNA
ggacagtaacatcatagaat

SEQ ID NO: 1396 - DNA, 20 bp, synthetic construct
  source 1..20: mol_type = other DNA
gattagcttaacacacattt

SEQ ID NO: 1397 - DNA, 20 bp, synthetic construct
  source 1..20: mol_type = other DNA
ggattgtctttctattaaga

SEQ ID NO: 1398 - DNA, 20 bp, synthetic construct
  source 1..20: mol_type = other DNA
cagatattcaaagtaacaac

SEQ ID NO: 1399 - DNA, 20 bp, synthetic construct
  source 1..20: mol_type = other DNA
taatggtcaatacctgttta

SEQ ID NO: 1400 - DNA, 20 bp, synthetic construct
  source 1..20: mol_type = other DNA
aacattttcaattcagttaa

SEQ ID NO: 1401 - DNA, 20 bp, synthetic construct
  source 1..20: mol_type = other DNA
gcttgacccatagacatgca

SEQ ID NO: 1402 - DNA, 20 bp, synthetic construct
  source 1..20: mol_type = other DNA
cttcattattctctggagca

SEQ ID NO: 1403 - DNA, 20 bp, synthetic construct
  source 1..20: mol_type = other DNA
taagcacctcagcttctcaa

SEQ ID NO: 1404 - DNA, 20 bp, synthetic construct
  source 1..20: mol_type = other DNA
cagtcagtagctttcagtct

SEQ ID NO: 1405 - DNA, 20 bp, synthetic construct
  source 1..20: mol_type = other DNA
atcctgtttatgtttctact

SEQ ID NO: 1406 - DNA, 20 bp, synthetic construct
  source 1..20: mol_type = other DNA
ctgcaaatttttctaaaaat

SEQ ID NO: 1407 - DNA, 20 bp, synthetic construct
  source 1..20: mol_type = other DNA
tgaactcagaaaccccttac

SEQ ID NO: 1408 - DNA, 20 bp, synthetic construct
  source 1..20: mol_type = other DNA
aatacccagcttgttgagat

SEQ ID NO: 1409 - DNA, 20 bp, synthetic construct
  source 1..20: mol_type = other DNA
tcataggctccaaatcatca

SEQ ID NO: 1410 - DNA, 20 bp, synthetic construct
  source 1..20: mol_type = other DNA
atctcatttaccctgggcac

SEQ ID NO: 1411 - DNA, 20 bp, synthetic construct
  source 1..20: mol_type = other DNA
tgtacattcatcaaatcaaa

SEQ ID NO: 1412 - DNA, 20 bp, synthetic construct
  source 1..20: mol_type = other DNA
aacaaacagatcaaacatcc

SEQ ID NO: 1413 - DNA, 20 bp, synthetic construct
  source 1..20: mol_type = other DNA
caactctttctcctgctcca

SEQ ID NO: 1414 - DNA, 20 bp, synthetic construct
  source 1..20: mol_type = other DNA
ttgactgtaaaaatcatctt

SEQ ID NO: 1415 - DNA, 20 bp, synthetic construct
  source 1..20: mol_type = other DNA
tgagattcgcttgaacactt

SEQ ID NO: 1416 - DNA, 20 bp, synthetic construct
  source 1..20: mol_type = other DNA
ctgcccccagccaccaccgc

SEQ ID NO: 1417 - DNA, 20 bp, synthetic construct
  source 1..20: mol_type = other DNA
cccagccaccaccatgaggc

SEQ ID NO: 1418 - DNA, 20 bp, synthetic construct
  source 1..20: mol_type = other DNA
accacgcgctccatcatctt

SEQ ID NO: 1419 - DNA, 20 bp, synthetic construct
  source 1..20: mol_type = other DNA
ccagtgcccatcagtgccaa

SEQ ID NO: 1420 - DNA, 20 bp, synthetic construct
  source 1..20: mol_type = other DNA
cactaagtccaaaaataagt

SEQ ID NO: 1421 - DNA, 20 bp, synthetic construct
  source 1..20: mol_type = other DNA
gggttttcttaaaatggaaa

SEQ ID NO: 1422 - DNA, 20 bp, synthetic construct
  source 1..20: mol_type = other DNA
aaagtaaaacatcaccccag

SEQ ID NO: 1423 - DNA, 20 bp, synthetic construct
  source 1..20: mol_type = other DNA
agtgttgtgacaatatttac

SEQ ID NO: 1424 - DNA, 20 bp, synthetic construct
  source 1..20: mol_type = other DNA
tgttacagttatgttcactg

SEQ ID NO: 1425 - DNA, 20 bp, synthetic construct
  source 1..20: mol_type = other DNA
acatttgatttcaagtccca

SEQ ID NO: 1426 - DNA, 20 bp, synthetic construct
  source 1..20: mol_type = other DNA
gggtcctttaaacatctaaa

SEQ ID NO: 1427 - DNA, 20 bp, synthetic construct
  source 1..20: mol_type = other DNA
gaaggcaatttacttttcag

SEQ ID NO: 1428 - DNA, 20 bp, synthetic construct
  source 1..20: mol_type = other DNA
aaatcattctggtttccagg

SEQ ID NO: 1429 - DNA, 20 bp, synthetic construct
  source 1..20: mol_type = other DNA
atggtgctttcacaactgca

SEQ ID NO: 1430 - DNA, 20 bp, synthetic construct
  source 1..20: mol_type = other DNA
attttttaattacatcatcc

SEQ ID NO: 1431 - DNA, 20 bp, synthetic construct
  source 1..20: mol_type = other DNA
agcagttcttttctttgcac

SEQ ID NO: 1432 - DNA, 20 bp, synthetic construct
  source 1..20: mol_type = other DNA
tgaacttgacctaattctgg

SEQ ID NO: 1433 - DNA, 20 bp, synthetic construct
  source 1..20: mol_type = other DNA
ctccctattctttgattcaa

SEQ ID NO: 1434 - DNA, 20 bp, synthetic construct
  source 1..20: mol_type = other DNA
gtcatctccaacctaagata

SEQ ID NO: 1435 - DNA, 20 bp, synthetic construct
  source 1..20: mol_type = other DNA
cacttcaaatcaatcatatt

SEQ ID NO: 1436 - DNA, 20 bp, synthetic construct
  source 1..20: mol_type = other DNA
attttactttaattaacatt

SEQ ID NO: 1437 - DNA, 20 bp, synthetic construct
  source 1..20: mol_type = other DNA
tacatatctgctaggtgaca

SEQ ID NO: 1438 - DNA, 20 bp, synthetic construct
  source 1..20: mol_type = other DNA
tcctatgcaatatatatttt

SEQ ID NO: 1439 - DNA, 20 bp, synthetic construct
  source 1..20: mol_type = other DNA
tcagtaccttacaaaagtta

SEQ ID NO: 1440 - DNA, 20 bp, synthetic construct
  source 1..20: mol_type = other DNA
agtacatgcatatttcaaag

SEQ ID NO: 1441 - DNA, 20 bp, synthetic construct
  source 1..20: mol_type = other DNA
tttcagtcagatattaaaca

SEQ ID NO: 1442 - DNA, 20 bp, synthetic construct
  source 1..20: mol_type = other DNA
cgggaaacacttcaaatcat

SEQ ID NO: 1443 - DNA, 20 bp, synthetic construct
  source 1..20: mol_type = other DNA
tttgtaaaaatccttaatcc

SEQ ID NO: 1444 - DNA, 20 bp, synthetic construct
  source 1..20: mol_type = other DNA
tttaacatatttatccaatt

SEQ ID NO: 1445 - DNA, 20 bp, synthetic construct
  source 1..20: mol_type = other DNA
ggtgattttttcctttcttc

SEQ ID NO: 1446 - DNA, 20 bp, synthetic construct
  source 1..20: mol_type = other DNA
tagctttttttcactgtaag

SEQ ID NO: 1447 - DNA, 20 bp, synthetic construct
  source 1..20: mol_type = other DNA
aataacatacaaatcacatc

SEQ ID NO: 1448 - DNA, 20 bp, synthetic construct
  source 1..20: mol_type = other DNA
tttatctattataatcttaa

SEQ ID NO: 1449 - DNA, 20 bp, synthetic construct
  source 1..20: mol_type = other DNA
aatttgcattttattgtgta

SEQ ID NO: 1450 - DNA, 20 bp, synthetic construct
  source 1..20: mol_type = other DNA
gttgctgttactattaatta

SEQ ID NO: 1451 - DNA, 20 bp, synthetic construct
  source 1..20: mol_type = other DNA
gaaagtagctatcatttcct

SEQ ID NO: 1452 - DNA, 20 bp, synthetic construct
  source 1..20: mol_type = other DNA
ttcttaatgcatcaccagat

SEQ ID NO: 1453 - DNA, 20 bp, synthetic construct
  source 1..20: mol_type = other DNA
ttaggctcttttccaggtgt

SEQ ID NO: 1454 - DNA, 20 bp, synthetic construct
  source 1..20: mol_type = other DNA
tggttacataatgttcattt

SEQ ID NO: 1455 - DNA, 20 bp, synthetic construct
  source 1..20: mol_type = other DNA
ttacttgtcagtttttcccc

SEQ ID NO: 1456 - DNA, 20 bp, synthetic construct
  source 1..20: mol_type = other DNA
attttctgtgcttttccttt

SEQ ID NO: 1457 - DNA, 20 bp, synthetic construct
  source 1..20: mol_type = other DNA
taacaatctctcctttctct

SEQ ID NO: 1458 - DNA, 20 bp, synthetic construct
  source 1..20: mol_type = other DNA
gactttcaaccttcctaaga

SEQ ID NO: 1459 - DNA, 20 bp, synthetic construct
  source 1..20: mol_type = other DNA
ttaagctgattttacaagaa

SEQ ID NO: 1460 - DNA, 20 bp, synthetic construct
  source 1..20: mol_type = other DNA
tgttatttgattacattatt

SEQ ID NO: 1461 - DNA, 20 bp, synthetic construct
  source 1..20: mol_type = other DNA
aagttcagagaatctttcac

SEQ ID NO: 1462 - DNA, 20 bp, synthetic construct
  source 1..20: mol_type = other DNA
ggaatggttaacacatcgac

SEQ ID NO: 1463 - DNA, 20 bp, synthetic construct
  source 1..20: mol_type = other DNA
ctataaaagcttctcaggga

SEQ ID NO: 1464 - DNA, 20 bp, synthetic construct
  source 1..20: mol_type = other DNA
gtaagaacttatcccaaggt

SEQ ID NO: 1465 - DNA, 20 bp, synthetic construct
  source 1..20: mol_type = other DNA
taaatggcactttcttttta

SEQ ID NO: 1466 - DNA, 20 bp, synthetic construct
  source 1..20: mol_type = other DNA
ttgatagggattctatggaa

SEQ ID NO: 1467 - DNA, 20 bp, synthetic construct
  source 1..20: mol_type = other DNA
gtgtgatacatcacagtaac

SEQ ID NO: 1468 - DNA, 20 bp, synthetic construct
  source 1..20: mol_type = other DNA
aaatacaggacattccatcc

SEQ ID NO: 1469 - DNA, 20 bp, synthetic construct
  source 1..20: mol_type = other DNA
atctaggatttaacctgaaa

SEQ ID NO: 1470 - DNA, 20 bp, synthetic construct
  source 1..20: mol_type = other DNA
tctattgcttttatgctatt

SEQ ID NO: 1471 - DNA, 20 bp, synthetic construct
  source 1..20: mol_type = other DNA
ccaacttattttaacagttt

SEQ ID NO: 1472 - DNA, 20 bp, synthetic construct
  source 1..20: mol_type = other DNA
aggacagtaacatcatagaa

SEQ ID NO: 1473 - DNA, 20 bp, synthetic construct
  source 1..20: mol_type = other DNA
tgattagcttaacacacatt

SEQ ID NO: 1474 - DNA, 20 bp, synthetic construct
  source 1..20: mol_type = other DNA
tggattgtctttctattaag

SEQ ID NO: 1475 - DNA, 20 bp, synthetic construct
  source 1..20: mol_type = other DNA
acagatattcaaagtaacaa

SEQ ID NO: 1476 - DNA, 20 bp, synthetic construct
  source 1..20: mol_type = other DNA
gtaatggtcaatacctgttt

SEQ ID NO: 1477 - DNA, 20 bp, synthetic construct
  source 1..20: mol_type = other DNA
taacattttcaattcagtta

SEQ ID NO: 1478 - DNA, 20 bp, synthetic construct
  source 1..20: mol_type = other DNA
cacagcagtgttcctagaca

SEQ ID NO: 1479 - DNA, 20 bp, synthetic construct
  source 1..20: mol_type = other DNA
gcttcattattctctggagc

SEQ ID NO: 1480 - DNA, 20 bp, synthetic construct
  source 1..20: mol_type = other DNA
cagtagctctaccttgaaaa

SEQ ID NO: 1481 - DNA, 20 bp, synthetic construct
  source 1..20: mol_type = other DNA
caggaaatcaaactagggca

SEQ ID NO: 1482 - DNA, 20 bp, synthetic construct
  source 1..20: mol_type = other DNA
catcctgtttatgtttctac

SEQ ID NO: 1483 - DNA, 20 bp, synthetic construct
  source 1..20: mol_type = other DNA
gctgcaaatttttctaaaaa

SEQ ID NO: 1484 - DNA, 20 bp, synthetic construct
  source 1..20: mol_type = other DNA
gtgaactcagaaacccctta

SEQ ID NO: 1485 - DNA, 20 bp, synthetic construct
  source 1..20: mol_type = other DNA
tgatctgcaattgtttttct

SEQ ID NO: 1486 - DNA, 20 bp, synthetic construct
  source 1..20: mol_type = other DNA
atcataggctccaaatcatc

SEQ ID NO: 1487 - DNA, 20 bp, synthetic construct
  source 1..20: mol_type = other DNA
gatctcatttaccctgggca

SEQ ID NO: 1488 - DNA, 20 bp, synthetic construct
  source 1..20: mol_type = other DNA
atgtacattcatcaaatcaa

SEQ ID NO: 1489 - DNA, 20 bp, synthetic construct
  source 1..20: mol_type = other DNA
caacaaacagatcaaacatc

SEQ ID NO: 1490 - DNA, 20 bp, synthetic construct
  source 1..20: mol_type = other DNA
acacaactctttctcctgct

SEQ ID NO: 1491 - DNA, 20 bp, synthetic construct
  source 1..20: mol_type = other DNA
attgactgtaaaaatcatct

SEQ ID NO: 1492 - DNA, 20 bp, synthetic construct
  source 1..20: mol_type = other DNA
ttgagattcgcttgaacact

SEQ ID NO: 1493 - DNA, 20 bp, synthetic construct
  source 1..20: mol_type = other DNA
caccatgaggctgcccccag

SEQ ID NO: 1494 - DNA, 20 bp, synthetic construct
  source 1..20: mol_type = other DNA
ttgaccccagccaccaccat

SEQ ID NO: 1495 - DNA, 20 bp, synthetic construct
  source 1..20: mol_type = other DNA
atctgctcaaccacgcgctc

SEQ ID NO: 1496 - DNA, 20 bp, synthetic construct
  source 1..20: mol_type = other DNA
tccagtgcccatcagtgcca

SEQ ID NO: 1497 - DNA, 20 bp, synthetic construct
  source 1..20: mol_type = other DNA
gcactaagtccaaaaataag

SEQ ID NO: 1498 - DNA, 20 bp, synthetic construct
  source 1..20: mol_type = other DNA
cgggttttcttaaaatggaa

SEQ ID NO: 1499 - DNA, 20 bp, synthetic construct
  source 1..20: mol_type = other DNA
aaaagtaaaacatcacccca

SEQ ID NO: 1500 - DNA, 20 bp, synthetic construct
  source 1..20: mol_type = other DNA
tcagtgttgtgacaatattt

SEQ ID NO: 1501 - DNA, 20 bp, synthetic construct
  source 1..20: mol_type = other DNA
atgttacagttatgttcact

SEQ ID NO: 1502 - DNA, 20 bp, synthetic construct
  source 1..20: mol_type = other DNA
aacatttgatttcaagtccc

SEQ ID NO: 1503 - DNA, 20 bp, synthetic construct
  source 1..20: mol_type = other DNA
tagggtcctttaaacatcta

SEQ ID NO: 1504 - DNA, 20 bp, synthetic construct
  source 1..20: mol_type = other DNA
tagaaggcaatttacttttc

SEQ ID NO: 1505 - DNA, 20 bp, synthetic construct
  source 1..20: mol_type = other DNA
tcaaaatcattctggtttcc

SEQ ID NO: 1506 - DNA, 20 bp, synthetic construct
  source 1..20: mol_type = other DNA
gatggtgctttcacaactgc

SEQ ID NO: 1507 - DNA, 20 bp, synthetic construct
  source 1..20: mol_type = other DNA
cattttttaattacatcatc

SEQ ID NO: 1508 - DNA, 20 bp, synthetic construct
  source 1..20: mol_type = other DNA
aagcagttcttttctttgca

SEQ ID NO: 1509 - DNA, 20 bp, synthetic construct
  source 1..20: mol_type = other DNA
atgaacttgacctaattctg

SEQ ID NO: 1510 - DNA, 20 bp, synthetic construct
  source 1..20: mol_type = other DNA
tctccctattctttgattca

SEQ ID NO: 1511 - DNA, 20 bp, synthetic construct
  source 1..20: mol_type = other DNA
tgtcatctccaacctaagat

SEQ ID NO: 1512 - DNA, 20 bp, synthetic construct
  source 1..20: mol_type = other DNA
ccacttcaaatcaatcatat

SEQ ID NO: 1513 - DNA, 20 bp, synthetic construct
  source 1..20: mol_type = other DNA
ggaataattttactttaatt

SEQ ID NO: 1514 - DNA, 20 bp, synthetic construct
  source 1..20: mol_type = other DNA
aatacatatctgctaggtga

SEQ ID NO: 1515 - DNA, 20 bp, synthetic construct
  source 1..20: mol_type = other DNA
tgtcctatgcaatatatatt

SEQ ID NO: 1516 - DNA, 20 bp, synthetic construct
  source 1..20: mol_type = other DNA
ttcagtaccttacaaaagtt

SEQ ID NO: 1517 - DNA, 20 bp, synthetic construct
  source 1..20: mol_type = other DNA
taaagtacatgcatatttca

SEQ ID NO: 1518 - DNA, 20 bp, synthetic construct
  source 1..20: mol_type = other DNA
ggtggtgctcatcttcgctc

SEQ ID NO: 1519 - DNA, 20 bp, synthetic construct
  source 1..20: mol_type = other DNA
ggaaacgggaaacacttcaa

SEQ ID NO: 1520 - DNA, 20 bp, synthetic construct
  source 1..20: mol_type = other DNA
atatttgtaaaaatccttaa

SEQ ID NO: 1521 - DNA, 20 bp, synthetic construct
  source 1..20: mol_type = other DNA
gtttaacatatttatccaat

SEQ ID NO: 1522 - DNA, 20 bp, synthetic construct
  source 1..20: mol_type = other DNA
tggtgattttttcctttctt

SEQ ID NO: 1523 - DNA, 20 bp, synthetic construct
  source 1..20: mol_type = other DNA
ttagctttttttcactgtaa

SEQ ID NO: 1524 - DNA, 20 bp, synthetic construct
  source 1..20: mol_type = other DNA
atataaataacatacaaatc

SEQ ID NO: 1525 - DNA, 20 bp, synthetic construct
  source 1..20: mol_type = other DNA
atttatctattataatctta

SEQ ID NO: 1526 - DNA, 20 bp, synthetic construct
  source 1..20: mol_type = other DNA
ctaatttgcattttattgtg

SEQ ID NO: 1527 - DNA, 20 bp, synthetic construct
  source 1..20: mol_type = other DNA
aagttttgggcaaccttcca

SEQ ID NO: 1528 - DNA, 20 bp, synthetic construct
  source 1..20: mol_type = other DNA
agaaagtagctatcatttcc

SEQ ID NO: 1529 - DNA, 20 bp, synthetic construct
  source 1..20: mol_type = other DNA
gcttcttaatgcatcaccag

SEQ ID NO: 1530 - DNA, 20 bp, synthetic construct
  source 1..20: mol_type = other DNA
tttaggctcttttccaggtg

SEQ ID NO: 1531 - DNA, 20 bp, synthetic construct
  source 1..20: mol_type = other DNA
gtggttacataatgttcatt

SEQ ID NO: 1532 - DNA, 20 bp, synthetic construct
  source 1..20: mol_type = other DNA
cttttttacttgtcagtttt

SEQ ID NO: 1533 - DNA, 20 bp, synthetic construct
  source 1..20: mol_type = other DNA
ccgacaatttcaatgaaaac

SEQ ID NO: 1534 - DNA, 20 bp, synthetic construct
  source 1..20: mol_type = other DNA
atataacaatctctcctttc

SEQ ID NO: 1535 - DNA, 20 bp, synthetic construct
  source 1..20: mol_type = other DNA
tgactttcaaccttcctaag

SEQ ID NO: 1536 - DNA, 20 bp, synthetic construct
  source 1..20: mol_type = other DNA
gccatttctctgcaaaatta

SEQ ID NO: 1537 - DNA, 20 bp, synthetic construct
  source 1..20: mol_type = other DNA
ttgttatttgattacattat

SEQ ID NO: 1538 - DNA, 20 bp, synthetic construct
  source 1..20: mol_type = other DNA
aagtaagttaaaactgaagt

SEQ ID NO: 1539 - DNA, 20 bp, synthetic construct
  source 1..20: mol_type = other DNA
gatcacacaatactgtaaca

SEQ ID NO: 1540 - DNA, 20 bp, synthetic construct
  source 1..20: mol_type = other DNA
gagagtgcctagcgatggga

SEQ ID NO: 1541 - DNA, 20 bp, synthetic construct
  source 1..20: mol_type = other DNA
ctagtaagaacttatcccaa

SEQ ID NO: 1542 - DNA, 20 bp, synthetic construct
  source 1..20: mol_type = other DNA
gtaaatggcactttcttttt

SEQ ID NO: 1543 - DNA, 20 bp, synthetic construct
  source 1..20: mol_type = other DNA
ccttcacccaattttaggat

SEQ ID NO: 1544 - DNA, 20 bp, synthetic construct
  source 1..20: mol_type = other DNA
agtgtgatacatcacagtaa

SEQ ID NO: 1545 - DNA, 20 bp, synthetic construct
  source 1..20: mol_type = other DNA
caaacagacaaatacaggac

SEQ ID NO: 1546 - DNA, 20 bp, synthetic construct
  source 1..20: mol_type = other DNA
aacattcattcataatggca

SEQ ID NO: 1547 - DNA, 20 bp, synthetic construct
  source 1..20: mol_type = other DNA
aatctattgcttttatgcta

SEQ ID NO: 1548 - DNA, 20 bp, synthetic construct
  source 1..20: mol_type = other DNA
cccaacttattttaacagtt

SEQ ID NO: 1549 - DNA, 20 bp, synthetic construct
  source 1..20: mol_type = other DNA
gagaaatttctattttcctc

SEQ ID NO: 1550 - DNA, 20 bp, synthetic construct
  source 1..20: mol_type = other DNA
ttgattagcttaacacacat

SEQ ID NO: 1551 - DNA, 20 bp, synthetic construct
  source 1..20: mol_type = other DNA
atggattgtctttctattaa

SEQ ID NO: 1552 - DNA, 20 bp, synthetic construct
  source 1..20: mol_type = other DNA
acagtagcaataactgacca

SEQ ID NO: 1553 - DNA, 20 bp, synthetic construct
  source 1..20: mol_type = other DNA
tcctattaagtatatggtaa

SEQ ID NO: 1554 - DNA, 20 bp, synthetic construct
  source 1..20: mol_type = other DNA
ctaacattttcaattcagtt

SEQ ID NO: 1555 - DNA, 20 bp, synthetic construct
  source 1..20: mol_type = other DNA
gtttggttttgttcacagca

SEQ ID NO: 1556 - DNA, 20 bp, synthetic construct
  source 1..20: mol_type = other DNA
tggcttcattattctctgga

SEQ ID NO: 1557 - DNA, 20 bp, synthetic construct
  source 1..20: mol_type = other DNA
tcagtagctctaccttgaaa

SEQ ID NO: 1558 - DNA, 20 bp, synthetic construct
  source 1..20: mol_type = other DNA
gatgtagtccccacaatctc

SEQ ID NO: 1559 - DNA, 20 bp, synthetic construct
  source 1..20: mol_type = other DNA
acatcctgtttatgtttcta

SEQ ID NO: 1560 - DNA, 20 bp, synthetic construct
  source 1..20: mol_type = other DNA
agctgcaaatttttctaaaa

SEQ ID NO: 1561 - DNA, 20 bp, synthetic construct
  source 1..20: mol_type = other DNA
tgtgaactcagaaacccctt

SEQ ID NO: 1562 - DNA, 20 bp, synthetic construct
  source 1..20: mol_type = other DNA
gatgatctgcaattgttttt

SEQ ID NO: 1563 - DNA, 20 bp, synthetic construct
  source 1..20: mol_type = other DNA
taggtcaaatcataggctcc

SEQ ID NO: 1564 - DNA, 20 bp, synthetic construct
  source 1..20: mol_type = other DNA
agatctcatttaccctgggc

SEQ ID NO: 1565 - DNA, 20 bp, synthetic construct
  source 1..20: mol_type = other DNA
aatgtacattcatcaaatca

SEQ ID NO: 1566 - DNA, 20 bp, synthetic construct
  source 1..20: mol_type = other DNA
ccaaaacaacaaacagatca

SEQ ID NO: 1567 - DNA, 20 bp, synthetic construct
  source 1..20: mol_type = other DNA
aacacaactctttctcctgc

SEQ ID NO: 1568 - DNA, 20 bp, synthetic construct
  source 1..20: mol_type = other DNA
tcattgactgtaaaaatcat

SEQ ID NO: 1569 - DNA, 20 bp, synthetic construct
  source 1..20: mol_type = other DNA
agttgagattcgcttgaaca

SEQ ID NO: 1570 - DNA, 20 bp, synthetic construct
  source 1..20: mol_type = other DNA
ccaccatgaggctgccccca

SEQ ID NO: 1571 - DNA, 20 bp, synthetic construct
  source 1..20: mol_type = other DNA
ctccttgaccccagccacca

SEQ ID NO: 1572 - DNA, 20 bp, synthetic construct
  source 1..20: mol_type = other DNA
gatacacatctgctcaacca

SEQ ID NO: 1573 - DNA, 20 bp, synthetic construct
  source 1..20: mol_type = other DNA
ttccagtgcccatcagtgcc

SEQ ID NO: 1574 - DNA, 20 bp, synthetic construct
  source 1..20: mol_type = other DNA
ctgttgcactaagtccaaaa

SEQ ID NO: 1575 - DNA, 20 bp, synthetic construct
  source 1..20: mol_type = other DNA
tcgggttttcttaaaatgga

SEQ ID NO: 1576 - DNA, 20 bp, synthetic construct
  source 1..20: mol_type = other DNA
gaaaagtaaaacatcacccc

SEQ ID NO: 1577 - DNA, 20 bp, synthetic construct
  source 1..20: mol_type = other DNA
gttcagtgttgtgacaatat

SEQ ID NO: 1578 - DNA, 20 bp, synthetic construct
  source 1..20: mol_type = other DNA
tatgttacagttatgttcac

SEQ ID NO: 1579 - DNA, 20 bp, synthetic construct
  source 1..20: mol_type = other DNA
aaacatttgatttcaagtcc

SEQ ID NO: 1580 - DNA, 20 bp, synthetic construct
  source 1..20: mol_type = other DNA
tatagggtcctttaaacatc

SEQ ID NO: 1581 - DNA, 20 bp, synthetic construct
  source 1..20: mol_type = other DNA
ctagaaggcaatttactttt

SEQ ID NO: 1582 - DNA, 20 bp, synthetic construct
  source 1..20: mol_type = other DNA
gtcaaaatcattctggtttc

SEQ ID NO: 1583 - DNA, 20 bp, synthetic construct
  source 1..20: mol_type = other DNA
tgatggtgctttcacaactg

SEQ ID NO: 1584 - DNA, 20 bp, synthetic construct
  source 1..20: mol_type = other DNA
accattttttaattacatca

SEQ ID NO: 1585 - DNA, 20 bp, synthetic construct
  source 1..20: mol_type = other DNA
caagcagttcttttctttgc

SEQ ID NO: 1586 - DNA, 20 bp, synthetic construct
  source 1..20: mol_type = other DNA
ctatgaacttgacctaattc

SEQ ID NO: 1587 - DNA, 20 bp, synthetic construct
  source 1..20: mol_type = other DNA
gtctccctattctttgattc

SEQ ID NO: 1588 - DNA, 20 bp, synthetic construct
  source 1..20: mol_type = other DNA
ctgtcatctccaacctaaga

SEQ ID NO: 1589 - DNA, 20 bp, synthetic construct
  source 1..20: mol_type = other DNA
tccacttcaaatcaatcata

SEQ ID NO: 1590 - DNA, 20 bp, synthetic construct
  source 1..20: mol_type = other DNA
cagggaataattttacttta

SEQ ID NO: 1591 - DNA, 20 bp, synthetic construct
  source 1..20: mol_type = other DNA
gtaatacatatctgctaggt

SEQ ID NO: 1592 - DNA, 20 bp, synthetic construct
  source 1..20: mol_type = other DNA
tctgtcctatgcaatatata

SEQ ID NO: 1593 - DNA, 20 bp, synthetic construct
  source 1..20: mol_type = other DNA
attcagtaccttacaaaagt

SEQ ID NO: 1594 - DNA, 20 bp, synthetic construct
  source 1..20: mol_type = other DNA
caaagttacaaatatagaaa

SEQ ID NO: 1595 - DNA, 20 bp, synthetic construct
  source 1..20: mol_type = other DNA
cccgcggctcccctgccccc

SEQ ID NO: 1596 - DNA, 20 bp, synthetic construct
  source 1..20: mol_type = other DNA
ggagttttccctaaggaaac

SEQ ID NO: 1597 - DNA, 20 bp, synthetic construct
  source 1..20: mol_type = other DNA
tatatttgtaaaaatcctta

SEQ ID NO: 1598 - DNA, 20 bp, synthetic construct
  source 1..20: mol_type = other DNA
agtttaacatatttatccaa

SEQ ID NO: 1599 - DNA, 20 bp, synthetic construct
  source 1..20: mol_type = other DNA
ctggtgattttttcctttct

SEQ ID NO: 1600 - DNA, 20 bp, synthetic construct
  source 1..20: mol_type = other DNA
gttagctttttttcactgta

SEQ ID NO: 1601 - DNA, 20 bp, synthetic construct
  source 1..20: mol_type = other DNA
tagatataaataacatacaa

SEQ ID NO: 1602 - DNA, 20 bp, synthetic construct
  source 1..20: mol_type = other DNA
catttatctattataatctt

SEQ ID NO: 1603 - DNA, 20 bp, synthetic construct
  source 1..20: mol_type = other DNA
tctaatttgcattttattgt

SEQ ID NO: 1604 - DNA, 20 bp, synthetic construct
  source 1..20: mol_type = other DNA
ccaagttttgggcaaccttc

SEQ ID NO: 1605 - DNA, 20 bp, synthetic construct
  source 1..20: mol_type = other DNA
cagaaagtagctatcatttc

SEQ ID NO: 1606 - DNA, 20 bp, synthetic construct
  source 1..20: mol_type = other DNA
cagcttcttaatgcatcacc

SEQ ID NO: 1607 - DNA, 20 bp, synthetic construct
  source 1..20: mol_type = other DNA
atttaggctcttttccaggt

SEQ ID NO: 1608 - DNA, 20 bp, synthetic construct
  source 1..20: mol_type = other DNA
agtggttacataatgttcat

SEQ ID NO: 1609 - DNA, 20 bp, synthetic construct
  source 1..20: mol_type = other DNA
acttttttacttgtcagttt

SEQ ID NO: 1610 - DNA, 20 bp, synthetic construct
  source 1..20: mol_type = other DNA
accgacaatttcaatgaaaa

SEQ ID NO: 1611 - DNA, 20 bp, synthetic construct
  source 1..20: mol_type = other DNA
gcaaatataacaatctctcc

SEQ ID NO: 1612 - DNA, 20 bp, synthetic construct
  source 1..20: mol_type = other DNA
ggtgactttcaaccttccta

SEQ ID NO: 1613 - DNA, 20 bp, synthetic construct
  source 1..20: mol_type = other DNA
tgtggccatttctctgcaaa

SEQ ID NO: 1614 - DNA, 20 bp, synthetic construct
  source 1..20: mol_type = other DNA
tattgttatttgattacatt

SEQ ID NO: 1615 - DNA, 20 bp, synthetic construct
  source 1..20: mol_type = other DNA
ttttgaatgtttaatatgca

SEQ ID NO: 1616 - DNA, 20 bp, synthetic construct
  source 1..20: mol_type = other DNA
gtgatcacacaatactgtaa

SEQ ID NO: 1617 - DNA, 20 bp, synthetic construct
  source 1..20: mol_type = other DNA
acattgctggaacccatcac

SEQ ID NO: 1618 - DNA, 20 bp, synthetic construct
  source 1..20: mol_type = other DNA
gctagtaagaacttatccca

SEQ ID NO: 1619 - DNA, 20 bp, synthetic construct
  source 1..20: mol_type = other DNA
tgtaaatggcactttctttt

SEQ ID NO: 1620 - DNA, 20 bp, synthetic construct
  source 1..20: mol_type = other DNA
accttcacccaattttagga

SEQ ID NO: 1621 - DNA, 20 bp, synthetic construct
  source 1..20: mol_type = other DNA
aagtgtgatacatcacagta

SEQ ID NO: 1622 - DNA, 20 bp, synthetic construct
  source 1..20: mol_type = other DNA
ccaaacagacaaatacagga

SEQ ID NO: 1623 - DNA, 20 bp, synthetic construct
  source 1..20: mol_type = other DNA
gctgtagttaaacatttcat

SEQ ID NO: 1624 - DNA, 20 bp, synthetic construct
  source 1..20: mol_type = other DNA
tgaacaataatctattgctt

SEQ ID NO: 1625 - DNA, 20 bp, synthetic construct
  source 1..20: mol_type = other DNA
acccaacttattttaacagt

SEQ ID NO: 1626 - DNA, 20 bp, synthetic construct
  source 1..20: mol_type = other DNA
gagagaaatttctattttcc

SEQ ID NO: 1627 - DNA, 20 bp, synthetic construct
  source 1..20: mol_type = other DNA
attgattagcttaacacaca

SEQ ID NO: 1628 - DNA, 20 bp, synthetic construct
  source 1..20: mol_type = other DNA
atgcaactttccttaatgaa

SEQ ID NO: 1629 - DNA, 20 bp, synthetic construct
  source 1..20: mol_type = other DNA
ctacagtagcaataactgac

SEQ ID NO: 1630 - DNA, 20 bp, synthetic construct
  source 1..20: mol_type = other DNA
tcaagatatcctattaagta

SEQ ID NO: 1631 - DNA, 20 bp, synthetic construct
  source 1..20: mol_type = other DNA
gctaacattttcaattcagt

SEQ ID NO: 1632 - DNA, 20 bp, synthetic construct
  source 1..20: mol_type = other DNA
ggagtttggttttgttcaca

SEQ ID NO: 1633 - DNA, 20 bp, synthetic construct
  source 1..20: mol_type = other DNA
ccatcactctacctaaaaca

SEQ ID NO: 1634 - DNA, 20 bp, synthetic construct
  source 1..20: mol_type = other DNA
ctatcagcaaatctcagtag

SEQ ID NO: 1635 - DNA, 20 bp, synthetic construct
  source 1..20: mol_type = other DNA
ttggaggctcttttaggtgg

SEQ ID NO: 1636 - DNA, 20 bp, synthetic construct
  source 1..20: mol_type = other DNA
ttaacatcctgtttatgttt

SEQ ID NO: 1637 - DNA, 20 bp, synthetic construct
  source 1..20: mol_type = other DNA
tagctgcaaatttttctaaa

SEQ ID NO: 1638 - DNA, 20 bp, synthetic construct
  source 1..20: mol_type = other DNA
ttgtgaactcagaaacccct

SEQ ID NO: 1639 - DNA, 20 bp, synthetic construct
  source 1..20: mol_type = other DNA
gggatgatctgcaattgttt

SEQ ID NO: 1640 - DNA, 20 bp, synthetic construct
  source 1..20: mol_type = other DNA
ctaggtcaaatcataggctc

SEQ ID NO: 1641 - DNA, 20 bp, synthetic construct
  source 1..20: mol_type = other DNA
taaagatctcatttaccctg

SEQ ID NO: 1642 - DNA, 20 bp, synthetic construct
  source 1..20: mol_type = other DNA
gaatgtacattcatcaaatc

SEQ ID NO: 1643 - DNA, 20 bp, synthetic construct
  source 1..20: mol_type = other DNA
accaaaacaacaaacagatc

SEQ ID NO: 1644 - DNA, 20 bp, synthetic construct
  source 1..20: mol_type = other DNA
tgaacacaactctttctcct

SEQ ID NO: 1645 - DNA, 20 bp, synthetic construct
  source 1..20: mol_type = other DNA
ctcattgactgtaaaaatca

SEQ ID NO: 1646 - DNA, 20 bp, synthetic construct
  source 1..20: mol_type = other DNA
gagttgagattcgcttgaac

SEQ ID NO: 1647 - DNA, 20 bp, synthetic construct
  source 1..20: mol_type = other DNA
accaccatgaggctgccccc

SEQ ID NO: 1648 - DNA, 20 bp, synthetic construct
  source 1..20: mol_type = other DNA
ggtgccacctccttgacccc

SEQ ID NO: 1649 - DNA, 20 bp, synthetic construct
  source 1..20: mol_type = other DNA
tgggtgatacacatctgctc

SEQ ID NO: 1650 - DNA, 20 bp, synthetic construct
  source 1..20: mol_type = other DNA
tttccagtgcccatcagtgc

SEQ ID NO: 1651 - DNA, 20 bp, synthetic construct
  source 1..20: mol_type = other DNA
tagcctcaacctgttgcact

SEQ ID NO: 1652 - DNA, 20 bp, synthetic construct
  source 1..20: mol_type = other DNA
gcctcctaacaaacctggca

SEQ ID NO: 1653 - DNA, 20 bp, synthetic construct
  source 1..20: mol_type = other DNA
tgaaaagtaaaacatcaccc

SEQ ID NO: 1654 - DNA, 20 bp, synthetic construct
  source 1..20: mol_type = other DNA
ggttcagtgttgtgacaata

SEQ ID NO: 1655 - DNA, 20 bp, synthetic construct
  source 1..20: mol_type = other DNA
atatgttacagttatgttca

SEQ ID NO: 1656 - DNA, 20 bp, synthetic construct
  source 1..20: mol_type = other DNA
caaacatttgatttcaagtc

SEQ ID NO: 1657 - DNA, 20 bp, synthetic construct
  source 1..20: mol_type = other DNA
atatagggtcctttaaacat

SEQ ID NO: 1658 - DNA, 20 bp, synthetic construct
  source 1..20: mol_type = other DNA
tctagaaggcaatttacttt

SEQ ID NO: 1659 - DNA, 20 bp, synthetic construct
  source 1..20: mol_type = other DNA
tgtcaaaatcattctggttt

SEQ ID NO: 1660 - DNA, 20 bp, synthetic construct
  source 1..20: mol_type = other DNA
atgatggtgctttcacaact

SEQ ID NO: 1661 - DNA, 20 bp, synthetic construct
  source 1..20: mol_type = other DNA
gaccattttttaattacatc

SEQ ID NO: 1662 - DNA, 20 bp, synthetic construct
  source 1..20: mol_type = other DNA
gcaagcagttcttttctttg

SEQ ID NO: 1663 - DNA, 20 bp, synthetic construct
  source 1..20: mol_type = other DNA
gaaactatgaacttgaccta

SEQ ID NO: 1664 - DNA, 20 bp, synthetic construct
  source 1..20: mol_type = other DNA
tgtctccctattctttgatt

SEQ ID NO: 1665 - DNA, 20 bp, synthetic construct
  source 1..20: mol_type = other DNA
tctgtcatctccaacctaag

SEQ ID NO: 1666 - DNA, 20 bp, synthetic construct
  source 1..20: mol_type = other DNA
ttccacttcaaatcaatcat

SEQ ID NO: 1667 - DNA, 20 bp, synthetic construct
  source 1..20: mol_type = other DNA
tcagggaataattttacttt

SEQ ID NO: 1668 - DNA, 20 bp, synthetic construct
  source 1..20: mol_type = other DNA
agtaatacatatctgctagg

SEQ ID NO: 1669 - DNA, 20 bp, synthetic construct
  source 1..20: mol_type = other DNA
gtctgtcctatgcaatatat

SEQ ID NO: 1670 - DNA, 20 bp, synthetic construct
  source 1..20: mol_type = other DNA
tattcagtaccttacaaaag

SEQ ID NO: 1671 - DNA, 20 bp, synthetic construct
  source 1..20: mol_type = other DNA
gcaaagttacaaatatagaa

SEQ ID NO: 1672 - DNA, 20 bp, synthetic construct
  source 1..20: mol_type = other DNA
aggagttttccctaaggaaa

SEQ ID NO: 1673 - DNA, 20 bp, synthetic construct
  source 1..20: mol_type = other DNA
ttatatttgtaaaaatcctt

SEQ ID NO: 1674 - DNA, 20 bp, synthetic construct
  source 1..20: mol_type = other DNA
aagtttaacatatttatcca

SEQ ID NO: 1675 - DNA, 20 bp, synthetic construct
  source 1..20: mol_type = other DNA
actggtgattttttcctttc

SEQ ID NO: 1676 - DNA, 20 bp, synthetic construct
  source 1..20: mol_type = other DNA
ggttagctttttttcactgt

SEQ ID NO: 1677 - DNA, 20 bp, synthetic construct
  source 1..20: mol_type = other DNA
ttagatataaataacataca

SEQ ID NO: 1678 - DNA, 20 bp, synthetic construct
  source 1..20: mol_type = other DNA
ccatttatctattataatct

SEQ ID NO: 1679 - DNA, 20 bp, synthetic construct
  source 1..20: mol_type = other DNA
gctctaatttgcattttatt

SEQ ID NO: 1680 - DNA, 20 bp, synthetic construct
  source 1..20: mol_type = other DNA
cagacacttgaaaatgccaa

SEQ ID NO: 1681 - DNA, 20 bp, synthetic construct
  source 1..20: mol_type = other DNA
gcagaaagtagctatcattt

SEQ ID NO: 1682 - DNA, 20 bp, synthetic construct
  source 1..20: mol_type = other DNA
ccagcttcttaatgcatcac

SEQ ID NO: 1683 - DNA, 20 bp, synthetic construct
  source 1..20: mol_type = other DNA
gtgttatacatttaggctct

SEQ ID NO: 1684 - DNA, 20 bp, synthetic construct
  source 1..20: mol_type = other DNA
ttagtggttacataatgttc

SEQ ID NO: 1685 - DNA, 20 bp, synthetic construct
  source 1..20: mol_type = other DNA
cccacttttttacttgtcag

SEQ ID NO: 1686 - DNA, 20 bp, synthetic construct
  source 1..20: mol_type = other DNA
tcaccgacaatttcaatgaa

SEQ ID NO: 1687 - DNA, 20 bp, synthetic construct
  source 1..20: mol_type = other DNA
agcaaatataacaatctctc

SEQ ID NO: 1688 - DNA, 20 bp, synthetic construct
  source 1..20: mol_type = other DNA
tggtgactttcaaccttcct

SEQ ID NO: 1689 - DNA, 20 bp, synthetic construct
  source 1..20: mol_type = other DNA
tctgtggccatttctctgca

SEQ ID NO: 1690 - DNA, 20 bp, synthetic construct
  source 1..20: mol_type = other DNA
gttattattgttatttgatt

SEQ ID NO: 1691 - DNA, 20 bp, synthetic construct
  source 1..20: mol_type = other DNA
catgttttgaatgtttaata

SEQ ID NO: 1692 - DNA, 20 bp, synthetic construct
  source 1..20: mol_type = other DNA
ccttaaagtgatcacacaat

SEQ ID NO: 1693 - DNA, 20 bp, synthetic construct
  source 1..20: mol_type = other DNA
ctgaaaaaaattttgcacaa

SEQ ID NO: 1694 - DNA, 20 bp, synthetic construct
  source 1..20: mol_type = other DNA
gttcatcttattcccattta

SEQ ID NO: 1695 - DNA, 20 bp, synthetic construct
  source 1..20: mol_type = other DNA
gctaaatttattctgaaata

SEQ ID NO: 1696 - DNA, 20 bp, synthetic construct
  source 1..20: mol_type = other DNA
aagatgccaccttcacccaa

SEQ ID NO: 1697 - DNA, 20 bp, synthetic construct
  source 1..20: mol_type = other DNA
tgatacagtgggattcatcc

SEQ ID NO: 1698 - DNA, 20 bp, synthetic construct
  source 1..20: mol_type = other DNA
acttagaccaaatggatcca

SEQ ID NO: 1699 - DNA, 20 bp, synthetic construct
  source 1..20: mol_type = other DNA
agtttttcaaatcaacaaat

SEQ ID NO: 1700 - DNA, 20 bp, synthetic construct
  source 1..20: mol_type = other DNA
cccaagatatcataatttta

SEQ ID NO: 1701 - DNA, 20 bp, synthetic construct
  source 1..20: mol_type = other DNA
agcacccaacttattttaac

SEQ ID NO: 1702 - DNA, 20 bp, synthetic construct
  source 1..20: mol_type = other DNA
ggagatcaaatctgtggagc

SEQ ID NO: 1703 - DNA, 20 bp, synthetic construct
  source 1..20: mol_type = other DNA
gcacaataatttattgatta

SEQ ID NO: 1704 - DNA, 20 bp, synthetic construct
  source 1..20: mol_type = other DNA
gtaaagattcttgttcagca

SEQ ID NO: 1705 - DNA, 20 bp, synthetic construct
  source 1..20: mol_type = other DNA
aacggcattcctctacagta

SEQ ID NO: 1706 - DNA, 20 bp, synthetic construct
  source 1..20: mol_type = other DNA
ttcaagatatcctattaagt

SEQ ID NO: 1707 - DNA, 20 bp, synthetic construct
  source 1..20: mol_type = other DNA
cagctaacattttcaattca

SEQ ID NO: 1708 - DNA, 20 bp, synthetic construct
  source 1..20: mol_type = other DNA
agtgcaggctcctttagggc

SEQ ID NO: 1709 - DNA, 20 bp, synthetic construct
  source 1..20: mol_type = other DNA
aaggcttttcttccagctac

SEQ ID NO: 1710 - DNA, 20 bp, synthetic construct
  source 1..20: mol_type = other DNA
tctatcagcaaatctcagta

SEQ ID NO: 1711 - DNA, 20 bp, synthetic construct
  source 1..20: mol_type = other DNA
tttggaggctcttttaggtg

SEQ ID NO: 1712 - DNA, 20 bp, synthetic construct
  source 1..20: mol_type = other DNA
aataaattaacatcctgttt

SEQ ID NO: 1713 - DNA, 20 bp, synthetic construct
  source 1..20: mol_type = other DNA
ttagctgcaaatttttctaa

SEQ ID NO: 1714 - DNA, 20 bp, synthetic construct
  source 1..20: mol_type = other DNA
tagaacatttttgtgaactc

SEQ ID NO: 1715 - DNA, 20 bp, synthetic construct
  source 1..20: mol_type = other DNA
tgggatgatctgcaattgtt

SEQ ID NO: 1716 - DNA, 20 bp, synthetic construct
  source 1..20: mol_type = other DNA
cctaggtcaaatcataggct

SEQ ID NO: 1717 - DNA, 20 bp, synthetic construct
  source 1..20: mol_type = other DNA
ttaaagatctcatttaccct

SEQ ID NO: 1718 - DNA, 20 bp, synthetic construct
  source 1..20: mol_type = other DNA
agaatgtacattcatcaaat

SEQ ID NO: 1719 - DNA, 20 bp, synthetic construct
  source 1..20: mol_type = other DNA
taccaaaacaacaaacagat

SEQ ID NO: 1720 - DNA, 20 bp, synthetic construct
  source 1..20: mol_type = other DNA
gtgaacacaactctttctcc

SEQ ID NO: 1721 - DNA, 20 bp, synthetic construct
  source 1..20: mol_type = other DNA
gctcattgactgtaaaaatc

SEQ ID NO: 1722 - DNA, 20 bp, synthetic construct
  source 1..20: mol_type = other DNA
aaacgagttgagattcgctt

SEQ ID NO: 1723 - DNA, 20 bp, synthetic construct
  source 1..20: mol_type = other DNA
caccaccatgaggctgcccc

SEQ ID NO: 1724 - DNA, 20 bp, synthetic construct
  source 1..20: mol_type = other DNA
tgggtgccacctccttgacc

SEQ ID NO: 1725 - DNA, 20 bp, synthetic construct
  source 1..20: mol_type = other DNA
accttcctcatcccactatc

SEQ ID NO: 1726 - DNA, 20 bp, synthetic construct
  source 1..20: mol_type = other DNA
tctatgttttccagtgccca

SEQ ID NO: 1727 - DNA, 20 bp, synthetic construct
  source 1..20: mol_type = other DNA
ttttagcctcaacctgttgc

SEQ ID NO: 1728 - DNA, 20 bp, synthetic construct
  source 1..20: mol_type = other DNA
atgtggcctcctaacaaacc

SEQ ID NO: 1729 - DNA, 20 bp, synthetic construct
  source 1..20: mol_type = other DNA
gtgaaaagtaaaacatcacc

SEQ ID NO: 1730 - DNA, 20 bp, synthetic construct
  source 1..20: mol_type = other DNA
aggttcagtgttgtgacaat

SEQ ID NO: 1731 - DNA, 20 bp, synthetic construct
  source 1..20: mol_type = other DNA
tatatgttacagttatgttc

SEQ ID NO: 1732 - DNA, 20 bp, synthetic construct
  source 1..20: mol_type = other DNA
ccaaacatttgatttcaagt

SEQ ID NO: 1733 - DNA, 20 bp, synthetic construct
  source 1..20: mol_type = other DNA
aggaatgccacatatagggt

SEQ ID NO: 1734 - DNA, 20 bp, synthetic construct
  source 1..20: mol_type = other DNA
gtctagaaggcaatttactt

SEQ ID NO: 1735 - DNA, 20 bp, synthetic construct
  source 1..20: mol_type = other DNA
atgtcaaaatcattctggtt

SEQ ID NO: 1736 - DNA, 20 bp, synthetic construct
  source 1..20: mol_type = other DNA
gatgatggtgctttcacaac

SEQ ID NO: 1737 - DNA, 20 bp, synthetic construct
  source 1..20: mol_type = other DNA
tgaccattttttaattacat

SEQ ID NO: 1738 - DNA, 20 bp, synthetic construct
  source 1..20: mol_type = other DNA
tgcaagcagttcttttcttt

SEQ ID NO: 1739 - DNA, 20 bp, synthetic construct
  source 1..20: mol_type = other DNA
agaaactatgaacttgacct

SEQ ID NO: 1740 - DNA, 20 bp, synthetic construct
  source 1..20: mol_type = other DNA
ttgtctccctattctttgat

SEQ ID NO: 1741 - DNA, 20 bp, synthetic construct
  source 1..20: mol_type = other DNA
ttctgtcatctccaacctaa

SEQ ID NO: 1742 - DNA, 20 bp, synthetic construct
  source 1..20: mol_type = other DNA
tttccacttcaaatcaatca

SEQ ID NO: 1743 - DNA, 20 bp, synthetic construct
  source 1..20: mol_type = other DNA
ttcagggaataattttactt

SEQ ID NO: 1744 - DNA, 20 bp, synthetic construct
  source 1..20: mol_type = other DNA
aagtaatacatatctgctag

SEQ ID NO: 1745 - DNA, 20 bp, synthetic construct
  source 1..20: mol_type = other DNA
taaacaaaactcctaagtct

SEQ ID NO: 1746 - DNA, 20 bp, synthetic construct
  source 1..20: mol_type = other DNA
gtattcagtaccttacaaaa

SEQ ID NO: 1747 - DNA, 20 bp, synthetic construct
  source 1..20: mol_type = other DNA
tgcaaagttacaaatataga

SEQ ID NO: 1748 - DNA, 20 bp, synthetic construct
  source 1..20: mol_type = other DNA
agatcctcatcattacagca

SEQ ID NO: 1749 - DNA, 20 bp, synthetic construct
  source 1..20: mol_type = other DNA
caggagttttccctaaggaa

SEQ ID NO: 1750 - DNA, 20 bp, synthetic construct
  source 1..20: mol_type = other DNA
tgataattatatttgtaaaa

SEQ ID NO: 1751 - DNA, 20 bp, synthetic construct
  source 1..20: mol_type = other DNA
gaagtttaacatatttatcc

SEQ ID NO: 1752 - DNA, 20 bp, synthetic construct
  source 1..20: mol_type = other DNA
ccactggtgattttttcctt

SEQ ID NO: 1753 - DNA, 20 bp, synthetic construct
  source 1..20: mol_type = other DNA
tggttagctttttttcactg

SEQ ID NO: 1754 - DNA, 20 bp, synthetic construct
  source 1..20: mol_type = other DNA
gttagatataaataacatac

SEQ ID NO: 1755 - DNA, 20 bp, synthetic construct
  source 1..20: mol_type = other DNA
gccatttatctattataatc

SEQ ID NO: 1756 - DNA, 20 bp, synthetic construct
  source 1..20: mol_type = other DNA
atgctctaatttgcatttta

SEQ ID NO: 1757 - DNA, 20 bp, synthetic construct
  source 1..20: mol_type = other DNA
ccagacacttgaaaatgcca

SEQ ID NO: 1758 - DNA, 20 bp, synthetic construct
  source 1..20: mol_type = other DNA
cgcagaaagtagctatcatt

SEQ ID NO: 1759 - DNA, 20 bp, synthetic construct
  source 1..20: mol_type = other DNA
cttccagcttcttaatgcat

SEQ ID NO: 1760 - DNA, 20 bp, synthetic construct
  source 1..20: mol_type = other DNA
tggtgttatacatttaggct

SEQ ID NO: 1761 - DNA, 20 bp, synthetic construct
  source 1..20: mol_type = other DNA
catgatttttagtggttaca

SEQ ID NO: 1762 - DNA, 20 bp, synthetic construct
  source 1..20: mol_type = other DNA
aacccacttttttacttgtc

SEQ ID NO: 1763 - DNA, 20 bp, synthetic construct
  source 1..20: mol_type = other DNA
atcaccgacaatttcaatga

SEQ ID NO: 1764 - DNA, 20 bp, synthetic construct
  source 1..20: mol_type = other DNA
tagcaaatataacaatctct

SEQ ID NO: 1765 - DNA, 20 bp, synthetic construct
  source 1..20: mol_type = other DNA
ttggtgactttcaaccttcc

SEQ ID NO: 1766 - DNA, 20 bp, synthetic construct
  source 1..20: mol_type = other DNA
aaatctgtggccatttctct

SEQ ID NO: 1767 - DNA, 20 bp, synthetic construct
  source 1..20: mol_type = other DNA
ctgttatgttattattgtta

SEQ ID NO: 1768 - DNA, 20 bp, synthetic construct
  source 1..20: mol_type = other DNA
acatgttttgaatgtttaat

SEQ ID NO: 1769 - DNA, 20 bp, synthetic construct
  source 1..20: mol_type = other DNA
ctcccttaaagtgatcacac

SEQ ID NO: 1770 - DNA, 20 bp, synthetic construct
  source 1..20: mol_type = other DNA
gctgaaaaaaattttgcaca

SEQ ID NO: 1771 - DNA, 20 bp, synthetic construct
  source 1..20: mol_type = other DNA
cgttcatcttattcccattt

SEQ ID NO: 1772 - DNA, 20 bp, synthetic construct
  source 1..20: mol_type = other DNA
tggctaaatttattctgaaa

SEQ ID NO: 1773 - DNA, 20 bp, synthetic construct
  source 1..20: mol_type = other DNA
aaagatgccaccttcaccca

SEQ ID NO: 1774 - DNA, 20 bp, synthetic construct
  source 1..20: mol_type = other DNA
agatcatttactatgataca

SEQ ID NO: 1775 - DNA, 20 bp, synthetic construct
  source 1..20: mol_type = other DNA
cttacacttcacttagacca

SEQ ID NO: 1776 - DNA, 20 bp, synthetic construct
  source 1..20: mol_type = other DNA
gtagtttttcaaatcaacaa

SEQ ID NO: 1777 - DNA, 20 bp, synthetic construct
  source 1..20: mol_type = other DNA
gcccaagatatcataatttt

SEQ ID NO: 1778 - DNA, 20 bp, synthetic construct
  source 1..20: mol_type = other DNA
cagcacccaacttattttaa

SEQ ID NO: 1779 - DNA, 20 bp, synthetic construct
  source 1..20: mol_type = other DNA
aaggagatcaaatctgtgga

SEQ ID NO: 1780 - DNA, 20 bp, synthetic construct
  source 1..20: mol_type = other DNA
ggcacaataatttattgatt

SEQ ID NO: 1781 - DNA, 20 bp, synthetic construct
  source 1..20: mol_type = other DNA
tgcagaggaacaacacatac

SEQ ID NO: 1782 - DNA, 20 bp, synthetic construct
  source 1..20: mol_type = other DNA
gataacatgagaaccaacgc

SEQ ID NO: 1783 - DNA, 20 bp, synthetic construct
  source 1..20: mol_type = other DNA
tttcaagatatcctattaag

SEQ ID NO: 1784 - DNA, 20 bp, synthetic construct
  source 1..20: mol_type = other DNA
ccagctaacattttcaattc

SEQ ID NO: 1785 - DNA, 20 bp, synthetic construct
  source 1..20: mol_type = other DNA
ttattattcatgttctccac

SEQ ID NO: 1786 - DNA, 20 bp, synthetic construct
  source 1..20: mol_type = other DNA
tagaaggcttttcttccagc

SEQ ID NO: 1787 - DNA, 20 bp, synthetic construct
  source 1..20: mol_type = other DNA
acattggatctatcagcaaa

SEQ ID NO: 1788 - DNA, 20 bp, synthetic construct
  source 1..20: mol_type = other DNA
agttaaagtactcaggtcat

SEQ ID NO: 1789 - DNA, 20 bp, synthetic construct
  source 1..20: mol_type = other DNA
aaataaattaacatcctgtt

SEQ ID NO: 1790 - DNA, 20 bp, synthetic construct
  source 1..20: mol_type = other DNA
aattagctgcaaatttttct

SEQ ID NO: 1791 - DNA, 20 bp, synthetic construct
  source 1..20: mol_type = other DNA
tttagaacatttttgtgaac

SEQ ID NO: 1792 - DNA, 20 bp, synthetic construct
  source 1..20: mol_type = other DNA
gaagttagtcttgtcctcag

SEQ ID NO: 1793 - DNA, 20 bp, synthetic construct
  source 1..20: mol_type = other DNA
ccctaggtcaaatcataggc

SEQ ID NO: 1794 - DNA, 20 bp, synthetic construct
  source 1..20: mol_type = other DNA
attaaagatctcatttaccc

SEQ ID NO: 1795 - DNA, 20 bp, synthetic construct
  source 1..20: mol_type = other DNA
gagaatgtacattcatcaaa

SEQ ID NO: 1796 - DNA, 20 bp, synthetic construct
  source 1..20: mol_type = other DNA
tgtaccaaaacaacaaacag

SEQ ID NO: 1797 - DNA, 20 bp, synthetic construct
  source 1..20: mol_type = other DNA
acactgttgccaccctgtac

SEQ ID NO: 1798 - DNA, 20 bp, synthetic construct
  source 1..20: mol_type = other DNA
ggctcattgactgtaaaaat

SEQ ID NO: 1799 - DNA, 20 bp, synthetic construct
  source 1..20: mol_type = other DNA
aaaacgagttgagattcgct

SEQ ID NO: 1800 - DNA, 20 bp, synthetic construct
  source 1..20: mol_type = other DNA
ccaccaccatgaggctgccc

SEQ ID NO: 1801 - DNA, 20 bp, synthetic construct
  source 1..20: mol_type = other DNA
actgtgggtgccacctcctt

SEQ ID NO: 1802 - DNA, 20 bp, synthetic construct
  source 1..20: mol_type = other DNA
agaccttcctcatcccacta

SEQ ID NO: 1803 - DNA, 20 bp, synthetic construct
  source 1..20: mol_type = other DNA
tctactctatgttttccagt

SEQ ID NO: 1804 - DNA, 20 bp, synthetic construct
  source 1..20: mol_type = other DNA
ttgttttagcctcaacctgt

SEQ ID NO: 1805 - DNA, 20 bp, synthetic construct
  source 1..20: mol_type = other DNA
catgtggcctcctaacaaac

SEQ ID NO: 1806 - DNA, 20 bp, synthetic construct
  source 1..20: mol_type = other DNA
tgtgaaaagtaaaacatcac

SEQ ID NO: 1807 - DNA, 20 bp, synthetic construct
  source 1..20: mol_type = other DNA
gaggttcagtgttgtgacaa

SEQ ID NO: 1808 - DNA, 20 bp, synthetic construct
  source 1..20: mol_type = other DNA
atatatgttacagttatgtt

SEQ ID NO: 1809 - DNA, 20 bp, synthetic construct
  source 1..20: mol_type = other DNA
tcccaaacatttgatttcaa

SEQ ID NO: 1810 - DNA, 20 bp, synthetic construct
  source 1..20: mol_type = other DNA
tagtttaaagaaaggaatgc

SEQ ID NO: 1811 - DNA, 20 bp, synthetic construct
  source 1..20: mol_type = other DNA
tgtctagaaggcaatttact

SEQ ID NO: 1812 - DNA, 20 bp, synthetic construct
  source 1..20: mol_type = other DNA
tatgtcaaaatcattctggt

SEQ ID NO: 1813 - DNA, 20 bp, synthetic construct
  source 1..20: mol_type = other DNA
tgatgatggtgctttcacaa

SEQ ID NO: 1814 - DNA, 20 bp, synthetic construct
  source 1..20: mol_type = other DNA
ctgaccattttttaattaca

SEQ ID NO: 1815 - DNA, 20 bp, synthetic construct
  source 1..20: mol_type = other DNA
atgcaagcagttcttttctt

SEQ ID NO: 1816 - DNA, 20 bp, synthetic construct
  source 1..20: mol_type = other DNA
cagaaactatgaacttgacc

SEQ ID NO: 1817 - DNA, 20 bp, synthetic construct
  source 1..20: mol_type = other DNA
attgtctccctattctttga

SEQ ID NO: 1818 - DNA, 20 bp, synthetic construct
  source 1..20: mol_type = other DNA
tttctgtcatctccaaccta

SEQ ID NO: 1819 - DNA, 20 bp, synthetic construct
  source 1..20: mol_type = other DNA
ttttccacttcaaatcaatc

SEQ ID NO: 1820 - DNA, 20 bp, synthetic construct
  source 1..20: mol_type = other DNA
attcagggaataattttact

SEQ ID NO: 1821 - DNA, 20 bp, synthetic construct
  source 1..20: mol_type = other DNA
aaaagtaatacatatctgct

SEQ ID NO: 1822 - DNA, 20 bp, synthetic construct
  source 1..20: mol_type = other DNA
gctctaaacaaaactcctaa

SEQ ID NO: 1823 - DNA, 20 bp, synthetic construct
  source 1..20: mol_type = other DNA
agtattcagtaccttacaaa

SEQ ID NO: 1824 - DNA, 20 bp, synthetic construct
  source 1..20: mol_type = other DNA
acatgcaaagttacaaatat

SEQ ID NO: 1825 - DNA, 20 bp, synthetic construct
  source 1..20: mol_type = other DNA
tgaagatcctcatcattaca

SEQ ID NO: 1826 - DNA, 20 bp, synthetic construct
  source 1..20: mol_type = other DNA
ccaggagttttccctaagga

SEQ ID NO: 1827 - DNA, 20 bp, synthetic construct
  source 1..20: mol_type = other DNA
ttgataattatatttgtaaa

SEQ ID NO: 1828 - DNA, 20 bp, synthetic construct
  source 1..20: mol_type = other DNA
agaagtttaacatatttatc

SEQ ID NO: 1829 - DNA, 20 bp, synthetic construct
  source 1..20: mol_type = other DNA
tccactggtgattttttcct

SEQ ID NO: 1830 - DNA, 20 bp, synthetic construct
  source 1..20: mol_type = other DNA
ctggttagctttttttcact

SEQ ID NO: 1831 - DNA, 20 bp, synthetic construct
  source 1..20: mol_type = other DNA
tgttagatataaataacata

SEQ ID NO: 1832 - DNA, 20 bp, synthetic construct
  source 1..20: mol_type = other DNA
tgccatttatctattataat

SEQ ID NO: 1833 - DNA, 20 bp, synthetic construct
  source 1..20: mol_type = other DNA
aacatgctctaatttgcatt

SEQ ID NO: 1834 - DNA, 20 bp, synthetic construct
  source 1..20: mol_type = other DNA
cagaaccatctttgtgaccc

SEQ ID NO: 1835 - DNA, 20 bp, synthetic construct
  source 1..20: mol_type = other DNA
aactcatacatacagacgca

SEQ ID NO: 1836 - DNA, 20 bp, synthetic construct
  source 1..20: mol_type = other DNA
gcttccagcttcttaatgca

SEQ ID NO: 1837 - DNA, 20 bp, synthetic construct
  source 1..20: mol_type = other DNA
taattttcttagctactgcc

SEQ ID NO: 1838 - DNA, 20 bp, synthetic construct
  source 1..20: mol_type = other DNA
atcatgatttttagtggtta

SEQ ID NO: 1839 - DNA, 20 bp, synthetic construct
  source 1..20: mol_type = other DNA
taacccacttttttacttgt

SEQ ID NO: 1840 - DNA, 20 bp, synthetic construct
  source 1..20: mol_type = other DNA
agatcaccgacaatttcaat

SEQ ID NO: 1841 - DNA, 20 bp, synthetic construct
  source 1..20: mol_type = other DNA
gtagcaaatataacaatctc

SEQ ID NO: 1842 - DNA, 20 bp, synthetic construct
  source 1..20: mol_type = other DNA
catttggtgactttcaacct

SEQ ID NO: 1843 - DNA, 20 bp, synthetic construct
  source 1..20: mol_type = other DNA
attctaaaaatctgtggcca

SEQ ID NO: 1844 - DNA, 20 bp, synthetic construct
  source 1..20: mol_type = other DNA
tctgttatgttattattgtt

SEQ ID NO: 1845 - DNA, 20 bp, synthetic construct
  source 1..20: mol_type = other DNA
agatacagacatgttttgaa

SEQ ID NO: 1846 - DNA, 20 bp, synthetic construct
  source 1..20: mol_type = other DNA
gattacctcccttaaagtga

SEQ ID NO: 1847 - DNA, 20 bp, synthetic construct
  source 1..20: mol_type = other DNA
gttatattttaattttctga

SEQ ID NO: 1848 - DNA, 20 bp, synthetic construct
  source 1..20: mol_type = other DNA
ccgttcatcttattcccatt

SEQ ID NO: 1849 - DNA, 20 bp, synthetic construct
  source 1..20: mol_type = other DNA
tcttggctaaatttattctg

SEQ ID NO: 1850 - DNA, 20 bp, synthetic construct
  source 1..20: mol_type = other DNA
caaagatgccaccttcaccc

SEQ ID NO: 1851 - DNA, 20 bp, synthetic construct
  source 1..20: mol_type = other DNA
aaagatcatttactatgata

SEQ ID NO: 1852 - DNA, 20 bp, synthetic construct
  source 1..20: mol_type = other DNA
acttacacttcacttagacc

SEQ ID NO: 1853 - DNA, 20 bp, synthetic construct
  source 1..20: mol_type = other DNA
tggtagtttttcaaatcaac

SEQ ID NO: 1854 - DNA, 20 bp, synthetic construct
  source 1..20: mol_type = other DNA
cacaaagcccaagatatcat

SEQ ID NO: 1855 - DNA, 20 bp, synthetic construct
  source 1..20: mol_type = other DNA
cacacttagccaccctgcca

SEQ ID NO: 1856 - DNA, 20 bp, synthetic construct
  source 1..20: mol_type = other DNA
tagcttggtgggcttaagga

SEQ ID NO: 1857 - DNA, 20 bp, synthetic construct
  source 1..20: mol_type = other DNA
tggcacaataatttattgat

SEQ ID NO: 1858 - DNA, 20 bp, synthetic construct
  source 1..20: mol_type = other DNA
ccaattctacatgttctcat

SEQ ID NO: 1859 - DNA, 20 bp, synthetic construct
  source 1..20: mol_type = other DNA
gcacatagaaaatccaacag

SEQ ID NO: 1860 - DNA, 20 bp, synthetic construct
  source 1..20: mol_type = other DNA
ggcatatttcaagatatcct

SEQ ID NO: 1861 - DNA, 20 bp, synthetic construct
  source 1..20: mol_type = other DNA
gccagctaacattttcaatt

SEQ ID NO: 1862 - DNA, 20 bp, synthetic construct
  source 1..20: mol_type = other DNA
cttattattcatgttctcca

SEQ ID NO: 1863 - DNA, 20 bp, synthetic construct
  source 1..20: mol_type = other DNA
cctagaaggcttttcttcca

SEQ ID NO: 1864 - DNA, 20 bp, synthetic construct
  source 1..20: mol_type = other DNA
tacattggatctatcagcaa

SEQ ID NO: 1865 - DNA, 20 bp, synthetic construct
  source 1..20: mol_type = other DNA
agagttaaagtactcaggtc

SEQ ID NO: 1866 - DNA, 20 bp, synthetic construct
  source 1..20: mol_type = other DNA
aataaataaattaacatcct

SEQ ID NO: 1867 - DNA, 20 bp, synthetic construct
  source 1..20: mol_type = other DNA
tttatcacccaattagctgc

SEQ ID NO: 1868 - DNA, 20 bp, synthetic construct
  source 1..20: mol_type = other DNA
ctgttgccaattttagaaca

SEQ ID NO: 1869 - DNA, 20 bp, synthetic construct
  source 1..20: mol_type = other DNA
ctggaacactgaagttagtc

SEQ ID NO: 1870 - DNA, 20 bp, synthetic construct
  source 1..20: mol_type = other DNA
ctgctgtaccctaggtcaaa

SEQ ID NO: 1871 - DNA, 20 bp, synthetic construct
  source 1..20: mol_type = other DNA
tttcaaattaaagatctcat

SEQ ID NO: 1872 - DNA, 20 bp, synthetic construct
  source 1..20: mol_type = other DNA
ggagaatgtacattcatcaa

SEQ ID NO: 1873 - DNA, 20 bp, synthetic construct
  source 1..20: mol_type = other DNA
ttgtaccaaaacaacaaaca

SEQ ID NO: 1874 - DNA, 20 bp, synthetic construct
  source 1..20: mol_type = other DNA
tgctcagtagaaacactgtt

SEQ ID NO: 1875 - DNA, 20 bp, synthetic construct
  source 1..20: mol_type = other DNA
tggctcattgactgtaaaaa

SEQ ID NO: 1876 - DNA, 20 bp, synthetic construct
  source 1..20: mol_type = other DNA
aaaaaacgagttgagattcg

SEQ ID NO: 1877 - DNA, 20 bp, synthetic construct
  source 1..20: mol_type = other DNA
gccaccaccatgaggctgcc

SEQ ID NO: 1878 - DNA, 20 bp, synthetic construct
  source 1..20: mol_type = other DNA
cttactcggcttgttccact

SEQ ID NO: 1879 - DNA, 20 bp, synthetic construct
  source 1..20: mol_type = other DNA
aagaccttcctcatcccact

SEQ ID NO: 1880 - DNA, 20 bp, synthetic construct
  source 1..20: mol_type = other DNA
caggtctactctatgttttc

SEQ ID NO: 1881 - DNA, 20 bp, synthetic construct
  source 1..20: mol_type = other DNA
gagatttgttttagcctcaa

SEQ ID NO: 1882 - DNA, 20 bp, synthetic construct
  source 1..20: mol_type = other DNA
tcatgtggcctcctaacaaa

SEQ ID NO: 1883 - DNA, 20 bp, synthetic construct
  source 1..20: mol_type = other DNA
ctgtgaaaagtaaaacatca

SEQ ID NO: 1884 - DNA, 20 bp, synthetic construct
  source 1..20: mol_type = other DNA
ccagaggttcagtgttgtga

SEQ ID NO: 1885 - DNA, 20 bp, synthetic construct
  source 1..20: mol_type = other DNA
ttcatatatgttacagttat

SEQ ID NO: 1886 - DNA, 20 bp, synthetic construct
  source 1..20: mol_type = other DNA
cattcccaaacatttgattt

SEQ ID NO: 1887 - DNA, 20 bp, synthetic construct
  source 1..20: mol_type = other DNA
cctatagtttaaagaaagga

SEQ ID NO: 1888 - DNA, 20 bp, synthetic construct
  source 1..20: mol_type = other DNA
gtgtctagaaggcaatttac

SEQ ID NO: 1889 - DNA, 20 bp, synthetic construct
  source 1..20: mol_type = other DNA
gtatgtcaaaatcattctgg

SEQ ID NO: 1890 - DNA, 20 bp, synthetic construct
  source 1..20: mol_type = other DNA
atgatgatggtgctttcaca

SEQ ID NO: 1891 - DNA, 20 bp, synthetic construct
  source 1..20: mol_type = other DNA
actgaccattttttaattac

SEQ ID NO: 1892 - DNA, 20 bp, synthetic construct
  source 1..20: mol_type = other DNA
agaaatgcaagcagttcttt

SEQ ID NO: 1893 - DNA, 20 bp, synthetic construct
  source 1..20: mol_type = other DNA
tacagaaactatgaacttga

SEQ ID NO: 1894 - DNA, 20 bp, synthetic construct
  source 1..20: mol_type = other DNA
gattgtctccctattctttg

SEQ ID NO: 1895 - DNA, 20 bp, synthetic construct
  source 1..20: mol_type = other DNA
atttctgtcatctccaacct

SEQ ID NO: 1896 - DNA, 20 bp, synthetic construct
  source 1..20: mol_type = other DNA
ctttttccacttcaaatcaa

SEQ ID NO: 1897 - DNA, 20 bp, synthetic construct
  source 1..20: mol_type = other DNA
aattcagggaataattttac

SEQ ID NO: 1898 - DNA, 20 bp, synthetic construct
  source 1..20: mol_type = other DNA
gaaaagtaatacatatctgc

SEQ ID NO: 1899 - DNA, 20 bp, synthetic construct
  source 1..20: mol_type = other DNA
ctgctctaaacaaaactcct

SEQ ID NO: 1900 - DNA, 20 bp, synthetic construct
  source 1..20: mol_type = other DNA
aagtattcagtaccttacaa

SEQ ID NO: 1901 - DNA, 20 bp, synthetic construct
  source 1..20: mol_type = other DNA
aagaacatgcaaagttacaa

SEQ ID NO: 1902 - DNA, 20 bp, synthetic construct
  source 1..20: mol_type = other DNA
atgaagatcctcatcattac

SEQ ID NO: 1903 - DNA, 20 bp, synthetic construct
  source 1..20: mol_type = other DNA
taccaggagttttccctaag

SEQ ID NO: 1904 - DNA, 20 bp, synthetic construct
  source 1..20: mol_type = other DNA
tttgataattatatttgtaa

SEQ ID NO: 1905 - DNA, 20 bp, synthetic construct
  source 1..20: mol_type = other DNA
cagaagtttaacatatttat

SEQ ID NO: 1906 - DNA, 20 bp, synthetic construct
  source 1..20: mol_type = other DNA
attgctcctttccactggtg

SEQ ID NO: 1907 - DNA, 20 bp, synthetic construct
  source 1..20: mol_type = other DNA
actggttagctttttttcac

SEQ ID NO: 1908 - DNA, 20 bp, synthetic construct
  source 1..20: mol_type = other DNA
gtgttagatataaataacat

SEQ ID NO: 1909 - DNA, 20 bp, synthetic construct
  source 1..20: mol_type = other DNA
ttgccatttatctattataa

SEQ ID NO: 1910 - DNA, 20 bp, synthetic construct
  source 1..20: mol_type = other DNA
aaacatgctctaatttgcat

SEQ ID NO: 1911 - DNA, 20 bp, synthetic construct
  source 1..20: mol_type = other DNA
gcagaaccatctttgtgacc

SEQ ID NO: 1912 - DNA, 20 bp, synthetic construct
  source 1..20: mol_type = other DNA
aataactcatacatacagac

SEQ ID NO: 1913 - DNA, 20 bp, synthetic construct
  source 1..20: mol_type = other DNA
tgggtcacagcttccagctt

SEQ ID NO: 1914 - DNA, 20 bp, synthetic construct
  source 1..20: mol_type = other DNA
gtcataattttcttagctac

SEQ ID NO: 1915 - DNA, 20 bp, synthetic construct
  source 1..20: mol_type = other DNA
aaatcatgatttttagtggt

SEQ ID NO: 1916 - DNA, 20 bp, synthetic construct
  source 1..20: mol_type = other DNA
aataacccacttttttactt

SEQ ID NO: 1917 - DNA, 20 bp, synthetic construct
  source 1..20: mol_type = other DNA
gaaaattaagatcaccgaca

SEQ ID NO: 1918 - DNA, 20 bp, synthetic construct
  source 1..20: mol_type = other DNA
tcttttattctaagtagcaa

SEQ ID NO: 1919 - DNA, 20 bp, synthetic construct
  source 1..20: mol_type = other DNA
accctcattttctgtgacat

SEQ ID NO: 1920 - DNA, 20 bp, synthetic construct
  source 1..20: mol_type = other DNA
aattctaaaaatctgtggcc

SEQ ID NO: 1921 - DNA, 20 bp, synthetic construct
  source 1..20: mol_type = other DNA
aaacttctgttatgttatta

SEQ ID NO: 1922 - DNA, 20 bp, synthetic construct
  source 1..20: mol_type = other DNA
tagatacagacatgttttga

SEQ ID NO: 1923 - DNA, 20 bp, synthetic construct
  source 1..20: mol_type = other DNA
ggattacctcccttaaagtg

SEQ ID NO: 1924 - DNA, 20 bp, synthetic construct
  source 1..20: mol_type = other DNA
cttgttatattttaattttc

SEQ ID NO: 1925 - DNA, 20 bp, synthetic construct
  source 1..20: mol_type = other DNA
gaagaaaatttttaatgaga

SEQ ID NO: 1926 - DNA, 20 bp, synthetic construct
  source 1..20: mol_type = other DNA
tatctttctatttgtgtctc

SEQ ID NO: 1927 - DNA, 20 bp, synthetic construct
  source 1..20: mol_type = other DNA
acaaagatgccaccttcacc

SEQ ID NO: 1928 - DNA, 20 bp, synthetic construct
  source 1..20: mol_type = other DNA
gcaaattcaacagctcatta

SEQ ID NO: 1929 - DNA, 20 bp, synthetic construct
  source 1..20: mol_type = other DNA
atcagacttacacttcactt

SEQ ID NO: 1930 - DNA, 20 bp, synthetic construct
  source 1..20: mol_type = other DNA
gtggtagtttttcaaatcaa

SEQ ID NO: 1931 - DNA, 20 bp, synthetic construct
  source 1..20: mol_type = other DNA
ctgtcacaaacacaaagccc

SEQ ID NO: 1932 - DNA, 20 bp, synthetic construct
  source 1..20: mol_type = other DNA
gcacacttagccaccctgcc

SEQ ID NO: 1933 - DNA, 20 bp, synthetic construct
  source 1..20: mol_type = other DNA
cagttttgaataagatactt

SEQ ID NO: 1934 - DNA, 20 bp, synthetic construct
  source 1..20: mol_type = other DNA
attattgtgccaccaagcct

SEQ ID NO: 1935 - DNA, 20 bp, synthetic construct
  source 1..20: mol_type = other DNA
cagaaaacccaattctacat

SEQ ID NO: 1936 - DNA, 20 bp, synthetic construct
  source 1..20: mol_type = other DNA
tgcacatagaaaatccaaca

SEQ ID NO: 1937 - DNA, 20 bp, synthetic construct
  source 1..20: mol_type = other DNA
tggcatatttcaagatatcc

SEQ ID NO: 1938 - DNA, 20 bp, synthetic construct
  source 1..20: mol_type = other DNA
agtatttttgacaatggcca

SEQ ID NO: 1939 - DNA, 20 bp, synthetic construct
  source 1..20: mol_type = other DNA
gcttattattcatgttctcc

SEQ ID NO: 1940 - DNA, 20 bp, synthetic construct
  source 1..20: mol_type = other DNA
tgacaagcccatcctgtctc

SEQ ID NO: 1941 - DNA, 20 bp, synthetic construct
  source 1..20: mol_type = other DNA
attttctctcccagcataca

SEQ ID NO: 1942 - DNA, 20 bp, synthetic construct
  source 1..20: mol_type = other DNA
acaagcagagttaaagtact

SEQ ID NO: 1943 - DNA, 20 bp, synthetic construct
  source 1..20: mol_type = other DNA
ctggataatattcataaaaa

SEQ ID NO: 1944 - DNA, 20 bp, synthetic construct
  source 1..20: mol_type = other DNA
ctttatcacccaattagctg

SEQ ID NO: 1945 - DNA, 20 bp, synthetic construct
  source 1..20: mol_type = other DNA
aactgttgccaattttagaa

SEQ ID NO: 1946 - DNA, 20 bp, synthetic construct
  source 1..20: mol_type = other DNA
atatactggaacactgaagt

SEQ ID NO: 1947 - DNA, 20 bp, synthetic construct
  source 1..20: mol_type = other DNA
tacctgctgtaccctaggtc

SEQ ID NO: 1948 - DNA, 20 bp, synthetic construct
  source 1..20: mol_type = other DNA
tcttttcaaattaaagatct

SEQ ID NO: 1949 - DNA, 20 bp, synthetic construct
  source 1..20: mol_type = other DNA
tggagaatgtacattcatca

SEQ ID NO: 1950 - DNA, 20 bp, synthetic construct
  source 1..20: mol_type = other DNA
ctaatttttgtaccaaaaca

SEQ ID NO: 1951 - DNA, 20 bp, synthetic construct
  source 1..20: mol_type = other DNA
agtgcatagcaatggtatca

SEQ ID NO: 1952 - DNA, 20 bp, synthetic construct
  source 1..20: mol_type = other DNA
catctttaattggaaattcg

SEQ ID NO: 1953 - DNA, 20 bp, synthetic construct
  source 1..20: mol_type = other DNA
atcagttgataccgcctgcg

SEQ ID NO: 1954 - DNA, 20 bp, synthetic construct
  source 1..20: mol_type = other DNA
catgtggccacaaagagaac

SEQ ID NO: 1955 - DNA, 20 bp, synthetic construct
  source 1..20: mol_type = other DNA
aggctgcccccagccaccac

SEQ ID NO: 1956 - DNA, 20 bp, synthetic construct
  source 1..20: mol_type = other DNA
cgccaaggccccccaccact

SEQ ID NO: 1957 - DNA, 20 bp, synthetic construct
  source 1..20: mol_type = other DNA
acaggaagaccttcctcatc

SEQ ID NO: 1958 - DNA, 20 bp, synthetic construct
  source 1..20: mol_type = other DNA
ctcatgatgaactcaatcaa

SEQ ID NO: 1959 - DNA, 20 bp, synthetic construct
  source 1..20: mol_type = other DNA
ctatgaaatctctactaaga

SEQ ID NO: 1960 - DNA, 20 bp, synthetic construct
  source 1..20: mol_type = other DNA
gaataagtatcatgtggcct

SEQ ID NO: 1961 - DNA, 20 bp, synthetic construct
  source 1..20: mol_type = other DNA
atatttactcttgttgaaca

SEQ ID NO: 1962 - DNA, 20 bp, synthetic construct
  source 1..20: mol_type = other DNA
tcactgtgaatatgtcctct

SEQ ID NO: 1963 - DNA, 20 bp, synthetic construct
  source 1..20: mol_type = other DNA
aagcctttcatatatgttac

SEQ ID NO: 1964 - DNA, 20 bp, synthetic construct
  source 1..20: mol_type = other DNA
aagggcaccattcccaaaca

SEQ ID NO: 1965 - DNA, 20 bp, synthetic construct
  source 1..20: mol_type = other DNA
cagctgccttaattacctat

SEQ ID NO: 1966 - DNA, 20 bp, synthetic construct
  source 1..20: mol_type = other DNA
ggagatttgccttcagtgtc

SEQ ID NO: 1967 - DNA, 20 bp, synthetic construct
  source 1..20: mol_type = other DNA
agctctcctgtatgtcaaaa

SEQ ID NO: 1968 - DNA, 20 bp, synthetic construct
  source 1..20: mol_type = other DNA
atcatcctctatgatgatgg

SEQ ID NO: 1969 - DNA, 20 bp, synthetic construct
  source 1..20: mol_type = other DNA
tctttgcacactgaccattt

SEQ ID NO: 1970 - DNA, 20 bp, synthetic construct
  source 1..20: mol_type = other DNA
tttttgacaattatgagaca

SEQ ID NO: 1971 - DNA, 20 bp, synthetic construct
  source 1..20: mol_type = other DNA
tcaaaagccaattacagaaa

SEQ ID NO: 1972 - DNA, 20 bp, synthetic construct
  source 1..20: mol_type = other DNA
attttttagattgtctccct

SEQ ID NO: 1973 - DNA, 20 bp, synthetic construct
  source 1..20: mol_type = other DNA
atcatatttctgtcatctcc

SEQ ID NO: 1974 - DNA, 20 bp, synthetic construct
  source 1..20: mol_type = other DNA
aacagaatttctttttccac

SEQ ID NO: 1975 - DNA, 20 bp, synthetic construct
  source 1..20: mol_type = other DNA
gacaatatcaaacaattcag

SEQ ID NO: 1976 - DNA, 20 bp, synthetic construct
  source 1..20: mol_type = other DNA
tgcaagccaataataacatt

SEQ ID NO: 1977 - DNA, 20 bp, synthetic construct
  source 1..20: mol_type = other DNA
ttcagatgttaactgctcta

SEQ ID NO: 1978 - DNA, 20 bp, synthetic construct
  source 1..20: mol_type = other DNA
aaagggtttcccacatatta

SEQ ID NO: 1979 - DNA, 20 bp, synthetic construct
  source 1..20: mol_type = other DNA
ttatataacaaaacaagaac

SEQ ID NO: 1980 - DNA, 20 bp, synthetic construct
  source 1..20: mol_type = other DNA
atgctctcagaacaagaaaa

SEQ ID NO: 1981 - DNA, 20 bp, synthetic construct
  source 1..20: mol_type = other DNA
ttaatcctattctaccagga

SEQ ID NO: 1982 - DNA, 20 bp, synthetic construct
  source 1..20: mol_type = other DNA
ccaattccctgttcctatgt

SEQ ID NO: 1983 - DNA, 20 bp, synthetic construct
  source 1..20: mol_type = other DNA
ttgatttttccagaagttta

SEQ ID NO: 1984 - DNA, 20 bp, synthetic construct
  source 1..20: mol_type = other DNA
aagtaaaattgctcctttcc

SEQ ID NO: 1985 - DNA, 20 bp, synthetic construct
  source 1..20: mol_type = other DNA
cacatcctacccctctgcct

SEQ ID NO: 1986 - DNA, 20 bp, synthetic construct
  source 1..20: mol_type = other DNA
ttaatattttcctttcggtg

SEQ ID NO: 1987 - DNA, 20 bp, synthetic construct
  source 1..20: mol_type = other DNA
atcattttgccatttatcta

SEQ ID NO: 1988 - DNA, 20 bp, synthetic construct
  source 1..20: mol_type = other DNA
tgtaaaatgataacccaaac

SEQ ID NO: 1989 - DNA, 20 bp, synthetic construct
  source 1..20: mol_type = other DNA
gtccaaggtcacaaaattga

SEQ ID NO: 1990 - DNA, 20 bp, synthetic construct
  source 1..20: mol_type = other DNA
cgaaatgcccccaataactc

SEQ ID NO: 1991 - DNA, 20 bp, synthetic construct
  source 1..20: mol_type = other DNA
tagatcattctgctaggaat

SEQ ID NO: 1992 - DNA, 20 bp, synthetic construct
  source 1..20: mol_type = other DNA
taatgtgtcataattttctt

SEQ ID NO: 1993 - DNA, 20 bp, synthetic construct
  source 1..20: mol_type = other DNA
ccacatatcacaggctccaa

SEQ ID NO: 1994 - DNA, 20 bp, synthetic construct
  source 1..20: mol_type = other DNA
tgcagttaataacccacttt

SEQ ID NO: 1995 - DNA, 20 bp, synthetic construct
  source 1..20: mol_type = other DNA
gagagcaatatattcaccaa

SEQ ID NO: 1996 - DNA, 20 bp, synthetic construct
  source 1..20: mol_type = other DNA
actaaatcattaatcaacta

SEQ ID NO: 1997 - DNA, 20 bp, synthetic construct
  source 1..20: mol_type = other DNA
tgatcacagcctttcctgac

SEQ ID NO: 1998 - DNA, 20 bp, synthetic construct
  source 1..20: mol_type = other DNA
tcagcataattctaaaaatc

SEQ ID NO: 1999 - DNA, 20 bp, synthetic construct
  source 1..20: mol_type = other DNA
tggtgcagaaacttctgtta

SEQ ID NO: 2000 - DNA, 20 bp, synthetic construct
  source 1..20: mol_type = other DNA
attttataatgctgtagcca

SEQ ID NO: 2001 - DNA, 20 bp, synthetic construct
  source 1..20: mol_type = other DNA
actgaaggattacctccctt

SEQ ID NO: 2002 - DNA, 20 bp, synthetic construct
  source 1..20: mol_type = other DNA
cataatgtcccttgtctctt

SEQ ID NO: 2003 - DNA, 20 bp, synthetic construct
  source 1..20: mol_type = other DNA
tctaattttgtacacaatac

SEQ ID NO: 2004 - DNA, 20 bp, synthetic construct
  source 1..20: mol_type = other DNA
agcacaggctatctttctat

SEQ ID NO: 2005 - DNA, 20 bp, synthetic construct
  source 1..20: mol_type = other DNA
attgagagcttttcctctta

SEQ ID NO: 2006 - DNA, 20 bp, synthetic construct
  source 1..20: mol_type = other DNA
acaaaattctagcgaagcaa

SEQ ID NO: 2007 - DNA, 20 bp, synthetic construct
  source 1..20: mol_type = other DNA
gctttggatctcttagattt

SEQ ID NO: 2008 - DNA, 20 bp, synthetic construct
  source 1..20: mol_type = other DNA
tataatttttttacctggaa

SEQ ID NO: 2009 - DNA, 20 bp, synthetic construct
  source 1..20: mol_type = other DNA
atgaaaatcaatatcattcc

SEQ ID NO: 2010 - DNA, 20 bp, synthetic construct
  source 1..20: mol_type = other DNA
tagacatgtaaactttgcca

SEQ ID NO: 2011 - DNA, 20 bp, synthetic construct
  source 1..20: mol_type = other DNA
agtgtcagaattctaagggt

SEQ ID NO: 2012 - DNA, 20 bp, synthetic construct
  source 1..20: mol_type = other DNA
taggtgacccacaacacatt

SEQ ID NO: 2013 - DNA, 20 bp, synthetic construct
  source 1..20: mol_type = other DNA
agtgtggtacatatatgcta

SEQ ID NO: 2014 - DNA, 20 bp, synthetic construct
  source 1..20: mol_type = other DNA
ctatttgcaattagtgtgat

SEQ ID NO: 2015 - DNA, 20 bp, synthetic construct
  source 1..20: mol_type = other DNA
ctaagatactctctgtcacc

SEQ ID NO: 2016 - DNA, 20 bp, synthetic construct
  source 1..20: mol_type = other DNA
tactaaatatttataatgga

SEQ ID NO: 2017 - DNA, 20 bp, synthetic construct
  source 1..20: mol_type = other DNA
tctgtgcttattattcatgt

SEQ ID NO: 2018 - DNA, 20 bp, synthetic construct
  source 1..20: mol_type = other DNA
ccatcacttctcacctgatt

SEQ ID NO: 2019 - DNA, 20 bp, synthetic construct
  source 1..20: mol_type = other DNA
agtgactgaattttctctcc

SEQ ID NO: 2020 - DNA, 20 bp, synthetic construct
  source 1..20: mol_type = other DNA
gtggtcataagcaaatcaaa

SEQ ID NO: 2021 - DNA, 20 bp, synthetic construct
  source 1..20: mol_type = other DNA
ttttcatctccttcagagct

SEQ ID NO: 2022 - DNA, 20 bp, synthetic construct
  source 1..20: mol_type = other DNA
cccttacctttatcacccaa

SEQ ID NO: 2023 - DNA, 20 bp, synthetic construct
  source 1..20: mol_type = other DNA
ccatgtacagttcaatggtt

SEQ ID NO: 2024 - DNA, 20 bp, synthetic construct
  source 1..20: mol_type = other DNA
gccgtaaaacctataatggc

SEQ ID NO: 2025 - DNA, 20 bp, synthetic construct
  source 1..20: mol_type = other DNA
aatgattgctaaacagtacc

SEQ ID NO: 2026 - DNA, 20 bp, synthetic construct
  source 1..20: mol_type = other DNA
aatcaaaaatctcttttcaa

SEQ ID NO: 2027 - DNA, 20 bp, synthetic construct
  source 1..20: mol_type = other DNA
ccagaatgacaatttatgac

SEQ ID NO: 2028 - DNA, 20 bp, synthetic construct
  source 1..20: mol_type = other DNA
gtgaattattttcttctaat

SEQ ID NO: 2029 - DNA, 20 bp, synthetic construct
  source 1..20: mol_type = other DNA
tcatctttaattggaaattc

SEQ ID NO: 2030 - DNA, 20 bp, synthetic construct
  source 1..20: mol_type = other DNA
ttgcatcagttgataccgcc

SEQ ID NO: 2031 - DNA, 20 bp, synthetic construct
  source 1..20: mol_type = other DNA
ccatgtggccacaaagagaa

SEQ ID NO: 2032 - DNA, 20 bp, synthetic construct
  source 1..20: mol_type = other DNA
gaggctgcccccagccacca

SEQ ID NO: 2033 - DNA, 20 bp, synthetic construct
  source 1..20: mol_type = other DNA
taacggtcctcatagtcact

SEQ ID NO: 2034 - DNA, 20 bp, synthetic construct
  source 1..20: mol_type = other DNA
aaacaggaagaccttcctca

SEQ ID NO: 2035 - DNA, 20 bp, synthetic construct
  source 1..20: mol_type = other DNA
cattagcaacggctcatgat

SEQ ID NO: 2036 - DNA, 20 bp, synthetic construct
  source 1..20: mol_type = other DNA
gctatgaaatctctactaag

SEQ ID NO: 2037 - DNA, 20 bp, synthetic construct
  source 1..20: mol_type = other DNA
ggatttttttgaataagtat

SEQ ID NO: 2038 - DNA, 20 bp, synthetic construct
  source 1..20: mol_type = other DNA
aatatttactcttgttgaac

SEQ ID NO: 2039 - DNA, 20 bp, synthetic construct
  source 1..20: mol_type = other DNA
ttcactgtgaatatgtcctc

SEQ ID NO: 2040 - DNA, 20 bp, synthetic construct
  source 1..20: mol_type = other DNA
agaagcctttcatatatgtt

SEQ ID NO: 2041 - DNA, 20 bp, synthetic construct
  source 1..20: mol_type = other DNA
caagggcaccattcccaaac

SEQ ID NO: 2042 - DNA, 20 bp, synthetic construct
  source 1..20: mol_type = other DNA
tcagctgccttaattaccta

SEQ ID NO: 2043 - DNA, 20 bp, synthetic construct
  source 1..20: mol_type = other DNA
aggagatttgccttcagtgt

SEQ ID NO: 2044 - DNA, 20 bp, synthetic construct
  source 1..20: mol_type = other DNA
gcagctctcctgtatgtcaa

SEQ ID NO: 2045 - DNA, 20 bp, synthetic construct
  source 1..20: mol_type = other DNA
catcatcctctatgatgatg

SEQ ID NO: 2046 - DNA, 20 bp, synthetic construct
  source 1..20: mol_type = other DNA
ttctttgcacactgaccatt

SEQ ID NO: 2047 - DNA, 20 bp, synthetic construct
  source 1..20: mol_type = other DNA
gtttttgacaattatgagac

SEQ ID NO: 2048 - DNA, 20 bp, synthetic construct
  source 1..20: mol_type = other DNA
ttcaaaagccaattacagaa

SEQ ID NO: 2049 - DNA, 20 bp, synthetic construct
  source 1..20: mol_type = other DNA
tattttttagattgtctccc

SEQ ID NO: 2050 - DNA, 20 bp, synthetic construct
  source 1..20: mol_type = other DNA
aatcatatttctgtcatctc

SEQ ID NO: 2051 - DNA, 20 bp, synthetic construct
  source 1..20: mol_type = other DNA
taacagaatttctttttcca

SEQ ID NO: 2052 - DNA, 20 bp, synthetic construct
  source 1..20: mol_type = other DNA
tgacaatatcaaacaattca

SEQ ID NO: 2053 - DNA, 20 bp, synthetic construct
  source 1..20: mol_type = other DNA
agtgcaagccaataataaca

SEQ ID NO: 2054 - DNA, 20 bp, synthetic construct
  source 1..20: mol_type = other DNA
acttcagatgttaactgctc

SEQ ID NO: 2055 - DNA, 20 bp, synthetic construct
  source 1..20: mol_type = other DNA
attgtaagcctaaggaccac

SEQ ID NO: 2056 - DNA, 20 bp, synthetic construct
  source 1..20: mol_type = other DNA
tttatataacaaaacaagaa

SEQ ID NO: 2057 - DNA, 20 bp, synthetic construct
  source 1..20: mol_type = other DNA
gatgctctcagaacaagaaa

SEQ ID NO: 2058 - DNA, 20 bp, synthetic construct
  source 1..20: mol_type = other DNA
ccttaatcctattctaccag

SEQ ID NO: 2059 - DNA, 20 bp, synthetic construct
  source 1..20: mol_type = other DNA
tatccaattccctgttccta

SEQ ID NO: 2060 - DNA, 20 bp, synthetic construct
  source 1..20: mol_type = other DNA
gttgatttttccagaagttt

SEQ ID NO: 2061 - DNA, 20 bp, synthetic construct
  source 1..20: mol_type = other DNA
taagtaaaattgctcctttc

SEQ ID NO: 2062 - DNA, 20 bp, synthetic construct
  source 1..20: mol_type = other DNA
atcacatcctacccctctgc

SEQ ID NO: 2063 - DNA, 20 bp, synthetic construct
  source 1..20: mol_type = other DNA
cttaatattttcctttcggt

SEQ ID NO: 2064 - DNA, 20 bp, synthetic construct
  source 1..20: mol_type = other DNA
catcattttgccatttatct

SEQ ID NO: 2065 - DNA, 20 bp, synthetic construct
  source 1..20: mol_type = other DNA
tagatgtaaaatgataaccc

SEQ ID NO: 2066 - DNA, 20 bp, synthetic construct
  source 1..20: mol_type = other DNA
gatcaggaaattaggtagcc

SEQ ID NO: 2067 - DNA, 20 bp, synthetic construct
  source 1..20: mol_type = other DNA
tcgaaatgcccccaataact

SEQ ID NO: 2068 - DNA, 20 bp, synthetic construct
  source 1..20: mol_type = other DNA
aattttagatcattctgcta

SEQ ID NO: 2069 - DNA, 20 bp, synthetic construct
  source 1..20: mol_type = other DNA
ttcagttaatgtgtcataat

SEQ ID NO: 2070 - DNA, 20 bp, synthetic construct
  source 1..20: mol_type = other DNA
cccacatatcacaggctcca

SEQ ID NO: 2071 - DNA, 20 bp, synthetic construct
  source 1..20: mol_type = other DNA
caggtgcagttaataaccca

SEQ ID NO: 2072 - DNA, 20 bp, synthetic construct
  source 1..20: mol_type = other DNA
tgagagcaatatattcacca

SEQ ID NO: 2073 - DNA, 20 bp, synthetic construct
  source 1..20: mol_type = other DNA
tactaaatcattaatcaact

SEQ ID NO: 2074 - DNA, 20 bp, synthetic construct
  source 1..20: mol_type = other DNA
gtgatcacagcctttcctga

SEQ ID NO: 2075 - DNA, 20 bp, synthetic construct
  source 1..20: mol_type = other DNA
ttcagcataattctaaaaat

SEQ ID NO: 2076 - DNA, 20 bp, synthetic construct
  source 1..20: mol_type = other DNA
gtggtgcagaaacttctgtt

SEQ ID NO: 2077 - DNA, 20 bp, synthetic construct
  source 1..20: mol_type = other DNA
taggagttattttataatgc

SEQ ID NO: 2078 - DNA, 20 bp, synthetic construct
  source 1..20: mol_type = other DNA
taatgcttttcactgaagga

SEQ ID NO: 2079 - DNA, 20 bp, synthetic construct
  source 1..20: mol_type = other DNA
atgtcaaacaacccccgacc

SEQ ID NO: 2080 - DNA, 20 bp, synthetic construct
  source 1..20: mol_type = other DNA
ctctttctaattttgtacac

SEQ ID NO: 2081 - DNA, 20 bp, synthetic construct
  source 1..20: mol_type = other DNA
attatccccccatgagcaca

SEQ ID NO: 2082 - DNA, 20 bp, synthetic construct
  source 1..20: mol_type = other DNA
aattgagagcttttcctctt

SEQ ID NO: 2083 - DNA, 20 bp, synthetic construct
  source 1..20: mol_type = other DNA
tcttaacaaaattctagcga

SEQ ID NO: 2084 - DNA, 20 bp, synthetic construct
  source 1..20: mol_type = other DNA
aaggtaattttataaccccc

SEQ ID NO: 2085 - DNA, 20 bp, synthetic construct
  source 1..20: mol_type = other DNA
gtataatttttttacctgga

SEQ ID NO: 2086 - DNA, 20 bp, synthetic construct
  source 1..20: mol_type = other DNA
ttcaatgaaaatcaatatca

SEQ ID NO: 2087 - DNA, 20 bp, synthetic construct
  source 1..20: mol_type = other DNA
ccaagagtttcagtatagac

SEQ ID NO: 2088 - DNA, 20 bp, synthetic construct
  source 1..20: mol_type = other DNA
acacacatttcaagtgtcag

SEQ ID NO: 2089 - DNA, 20 bp, synthetic construct
  source 1..20: mol_type = other DNA
gccacagctatatataggtg

SEQ ID NO: 2090 - DNA, 20 bp, synthetic construct
  source 1..20: mol_type = other DNA
tcattgcaaaactatccaca

SEQ ID NO: 2091 - DNA, 20 bp, synthetic construct
  source 1..20: mol_type = other DNA
cactatttgcaattagtgtg

SEQ ID NO: 2092 - DNA, 20 bp, synthetic construct
  source 1..20: mol_type = other DNA
tctaagatactctctgtcac

SEQ ID NO: 2093 - DNA, 20 bp, synthetic construct
  source 1..20: mol_type = other DNA
aaggaataatcaaactaaat

SEQ ID NO: 2094 - DNA, 20 bp, synthetic construct
  source 1..20: mol_type = other DNA
tgttatttcctctgtgctta

SEQ ID NO: 2095 - DNA, 20 bp, synthetic construct
  source 1..20: mol_type = other DNA
cttccatcacttctcacctg

SEQ ID NO: 2096 - DNA, 20 bp, synthetic construct
  source 1..20: mol_type = other DNA
gagtgactgaattttctctc

SEQ ID NO: 2097 - DNA, 20 bp, synthetic construct
  source 1..20: mol_type = other DNA
acattattgaaatgggaagt

SEQ ID NO: 2098 - DNA, 20 bp, synthetic construct
  source 1..20: mol_type = other DNA
tttttcatctccttcagagc

SEQ ID NO: 2099 - DNA, 20 bp, synthetic construct
  source 1..20: mol_type = other DNA
ccccttacctttatcaccca

SEQ ID NO: 2100 - DNA, 20 bp, synthetic construct
  source 1..20: mol_type = other DNA
accatataccatgtacagtt

SEQ ID NO: 2101 - DNA, 20 bp, synthetic construct
  source 1..20: mol_type = other DNA
tgtgccgtaaaacctataat

SEQ ID NO: 2102 - DNA, 20 bp, synthetic construct
  source 1..20: mol_type = other DNA
aaatgattgctaaacagtac

SEQ ID NO: 2103 - DNA, 20 bp, synthetic construct
  source 1..20: mol_type = other DNA
aaatcaaaaatctcttttca

SEQ ID NO: 2104 - DNA, 20 bp, synthetic construct
  source 1..20: mol_type = other DNA
tccagaatgacaatttatga

SEQ ID NO: 2105 - DNA, 20 bp, synthetic construct
  source 1..20: mol_type = other DNA
gagtgaattattttcttcta

SEQ ID NO: 2106 - DNA, 20 bp, synthetic construct
  source 1..20: mol_type = other DNA
atcatctttaattggaaatt

SEQ ID NO: 2107 - DNA, 20 bp, synthetic construct
  source 1..20: mol_type = other DNA
acacttgcatcagttgatac

SEQ ID NO: 2108 - DNA, 20 bp, synthetic construct
  source 1..20: mol_type = other DNA
caggtcactccatgtggcca

SEQ ID NO: 2109 - DNA, 20 bp, synthetic construct
  source 1..20: mol_type = other DNA
tgaggctgcccccagccacc

SEQ ID NO: 2110 - DNA, 20 bp, synthetic construct
  source 1..20: mol_type = other DNA
gtaacggtcctcatagtcac

SEQ ID NO: 2111 - DNA, 20 bp, synthetic construct
  source 1..20: mol_type = other DNA
gatggtgaaaacaggaagac

SEQ ID NO: 2112 - DNA, 20 bp, synthetic construct
  source 1..20: mol_type = other DNA
tgttatacttttactggcct

SEQ ID NO: 2113 - DNA, 20 bp, synthetic construct
  source 1..20: mol_type = other DNA
tagctatgaaatctctacta

SEQ ID NO: 2114 - DNA, 20 bp, synthetic construct
  source 1..20: mol_type = other DNA
aggatttttttgaataagta

SEQ ID NO: 2115 - DNA, 20 bp, synthetic construct
  source 1..20: mol_type = other DNA
acaatatttactcttgttga

SEQ ID NO: 2116 - DNA, 20 bp, synthetic construct
  source 1..20: mol_type = other DNA
gttcactgtgaatatgtcct

SEQ ID NO: 2117 - DNA, 20 bp, synthetic construct
  source 1..20: mol_type = other DNA
cagaagcctttcatatatgt

SEQ ID NO: 2118 - DNA, 20 bp, synthetic construct
  source 1..20: mol_type = other DNA
ccaagggcaccattcccaaa

SEQ ID NO: 2119 - DNA, 20 bp, synthetic construct
  source 1..20: mol_type = other DNA
ttcagctgccttaattacct

SEQ ID NO: 2120 - DNA, 20 bp, synthetic construct
  source 1..20: mol_type = other DNA
aaggagatttgccttcagtg

SEQ ID NO: 2121 - DNA, 20 bp, synthetic construct
  source 1..20: mol_type = other DNA
tgcagctctcctgtatgtca

SEQ ID NO: 2122 - DNA, 20 bp, synthetic construct
  source 1..20: mol_type = other DNA
acatcatcctctatgatgat

SEQ ID NO: 2123 - DNA, 20 bp, synthetic construct
  source 1..20: mol_type = other DNA
tttctttgcacactgaccat

SEQ ID NO: 2124 - DNA, 20 bp, synthetic construct
  source 1..20: mol_type = other DNA
ggtttttgacaattatgaga

SEQ ID NO: 2125 - DNA, 20 bp, synthetic construct
  source 1..20: mol_type = other DNA
gattcaaaagccaattacag

SEQ ID NO: 2126 - DNA, 20 bp, synthetic construct
  source 1..20: mol_type = other DNA
atattttttagattgtctcc

SEQ ID NO: 2127 - DNA, 20 bp, synthetic construct
  source 1..20: mol_type = other DNA
caatcatatttctgtcatct

SEQ ID NO: 2128 - DNA, 20 bp, synthetic construct
  source 1..20: mol_type = other DNA
ttaacagaatttctttttcc

SEQ ID NO: 2129 - DNA, 20 bp, synthetic construct
  source 1..20: mol_type = other DNA
gtgacaatatcaaacaattc

SEQ ID NO: 2130 - DNA, 20 bp, synthetic construct
  source 1..20: mol_type = other DNA
aaagtgcaagccaataataa

SEQ ID NO: 2131 - DNA, 20 bp, synthetic construct
  source 1..20: mol_type = other DNA
acacttcagatgttaactgc

SEQ ID NO: 2132 - DNA, 20 bp, synthetic construct
  source 1..20: mol_type = other DNA
acattgtaagcctaaggacc

SEQ ID NO: 2133 - DNA, 20 bp, synthetic construct
  source 1..20: mol_type = other DNA
tttttatataacaaaacaag

SEQ ID NO: 2134 - DNA, 20 bp, synthetic construct
  source 1..20: mol_type = other DNA
tgatgctctcagaacaagaa

SEQ ID NO: 2135 - DNA, 20 bp, synthetic construct
  source 1..20: mol_type = other DNA
tccttaatcctattctacca

SEQ ID NO: 2136 - DNA, 20 bp, synthetic construct
  source 1..20: mol_type = other DNA
ttatccaattccctgttcct

SEQ ID NO: 2137 - DNA, 20 bp, synthetic construct
  source 1..20: mol_type = other DNA
tgttgatttttccagaagtt

SEQ ID NO: 2138 - DNA, 20 bp, synthetic construct
  source 1..20: mol_type = other DNA
gtaagtaaaattgctccttt

SEQ ID NO: 2139 - DNA, 20 bp, synthetic construct
  source 1..20: mol_type = other DNA
aaatcacatcctacccctct

SEQ ID NO: 2140 - DNA, 20 bp, synthetic construct
  source 1..20: mol_type = other DNA
tcttaatattttcctttcgg

SEQ ID NO: 2141 - DNA, 20 bp, synthetic construct
  source 1..20: mol_type = other DNA
atgactcatcattttgccat

SEQ ID NO: 2142 - DNA, 20 bp, synthetic construct
  source 1..20: mol_type = other DNA
gttattttaatagatgtaaa

SEQ ID NO: 2143 - DNA, 20 bp, synthetic construct
  source 1..20: mol_type = other DNA
tcatttcctccattctatga

SEQ ID NO: 2144 - DNA, 20 bp, synthetic construct
  source 1..20: mol_type = other DNA
ttaacaaaatgtttgtcact

SEQ ID NO: 2145 - DNA, 20 bp, synthetic construct
  source 1..20: mol_type = other DNA
ctaattttagatcattctgc

SEQ ID NO: 2146 - DNA, 20 bp, synthetic construct
  source 1..20: mol_type = other DNA
catttcagttaatgtgtcat

SEQ ID NO: 2147 - DNA, 20 bp, synthetic construct
  source 1..20: mol_type = other DNA
tttttccccacatatcacag

SEQ ID NO: 2148 - DNA, 20 bp, synthetic construct
  source 1..20: mol_type = other DNA
tcagatttttcacatatgcg

SEQ ID NO: 2149 - DNA, 20 bp, synthetic construct
  source 1..20: mol_type = other DNA
agtgagagcaatatattcac

SEQ ID NO: 2150 - DNA, 20 bp, synthetic construct
  source 1..20: mol_type = other DNA
ccaatacacaaattactaaa

SEQ ID NO: 2151 - DNA, 20 bp, synthetic construct
  source 1..20: mol_type = other DNA
agagcttgtgatcacagcct

SEQ ID NO: 2152 - DNA, 20 bp, synthetic construct
  source 1..20: mol_type = other DNA
ccttacataattcagcataa

SEQ ID NO: 2153 - DNA, 20 bp, synthetic construct
  source 1..20: mol_type = other DNA
gccatgttcagtgtcagtgt

SEQ ID NO: 2154 - DNA, 20 bp, synthetic construct
  source 1..20: mol_type = other DNA
cttaggagttattttataat

SEQ ID NO: 2155 - DNA, 20 bp, synthetic construct
  source 1..20: mol_type = other DNA
tataatgcttttcactgaag

SEQ ID NO: 2156 - DNA, 20 bp, synthetic construct
  source 1..20: mol_type = other DNA
ggcaaatgtcaaacaacccc

SEQ ID NO: 2157 - DNA, 20 bp, synthetic construct
  source 1..20: mol_type = other DNA
tctctttctaattttgtaca

SEQ ID NO: 2158 - DNA, 20 bp, synthetic construct
  source 1..20: mol_type = other DNA
cattaattatccccccatga

SEQ ID NO: 2159 - DNA, 20 bp, synthetic construct
  source 1..20: mol_type = other DNA
ccacatatgacaaggtcaca

SEQ ID NO: 2160 - DNA, 20 bp, synthetic construct
  source 1..20: mol_type = other DNA
gcagtataggccaatatccc

SEQ ID NO: 2161 - DNA, 20 bp, synthetic construct
  source 1..20: mol_type = other DNA
aaaggtaattttataacccc

SEQ ID NO: 2162 - DNA, 20 bp, synthetic construct
  source 1..20: mol_type = other DNA
taggtataatttttttacct

SEQ ID NO: 2163 - DNA, 20 bp, synthetic construct
  source 1..20: mol_type = other DNA
ttgaaaagttttcaatgaaa

SEQ ID NO: 2164 - DNA, 20 bp, synthetic construct
  source 1..20: mol_type = other DNA
gccatctactgaaataggac

SEQ ID NO: 2165 - DNA, 20 bp, synthetic construct
  source 1..20: mol_type = other DNA
aacacacatttcaagtgtca

SEQ ID NO: 2166 - DNA, 20 bp, synthetic construct
  source 1..20: mol_type = other DNA
gtaccataaccttttttttt

SEQ ID NO: 2167 - DNA, 20 bp, synthetic construct
  source 1..20: mol_type = other DNA
cggaaatatcattcgactca

SEQ ID NO: 2168 - DNA, 20 bp, synthetic construct
  source 1..20: mol_type = other DNA
gacactatttgcaattagtg

SEQ ID NO: 2169 - DNA, 20 bp, synthetic construct
  source 1..20: mol_type = other DNA
atctaagatactctctgtca

SEQ ID NO: 2170 - DNA, 20 bp, synthetic construct
  source 1..20: mol_type = other DNA
cataaggaataatcaaacta

SEQ ID NO: 2171 - DNA, 20 bp, synthetic construct
  source 1..20: mol_type = other DNA
atgttatttcctctgtgctt

SEQ ID NO: 2172 - DNA, 20 bp, synthetic construct
  source 1..20: mol_type = other DNA
tcggtgcttccatcacttct

SEQ ID NO: 2173 - DNA, 20 bp, synthetic construct
  source 1..20: mol_type = other DNA
tagagtgactgaattttctc

SEQ ID NO: 2174 - DNA, 20 bp, synthetic construct
  source 1..20: mol_type = other DNA
taacattattgaaatgggaa

SEQ ID NO: 2175 - DNA, 20 bp, synthetic construct
  source 1..20: mol_type = other DNA
ttatttttcatctccttcag

SEQ ID NO: 2176 - DNA, 20 bp, synthetic construct
  source 1..20: mol_type = other DNA
accccttacctttatcaccc

SEQ ID NO: 2177 - DNA, 20 bp, synthetic construct
  source 1..20: mol_type = other DNA
caccatataccatgtacagt

SEQ ID NO: 2178 - DNA, 20 bp, synthetic construct
  source 1..20: mol_type = other DNA
gtgtgccgtaaaacctataa

SEQ ID NO: 2179 - DNA, 20 bp, synthetic construct
  source 1..20: mol_type = other DNA
atgacaatagtaaaatgatt

SEQ ID NO: 2180 - DNA, 20 bp, synthetic construct
  source 1..20: mol_type = other DNA
caaatcaaaaatctcttttc

SEQ ID NO: 2181 - DNA, 20 bp, synthetic construct
  source 1..20: mol_type = other DNA
catccagaatgacaatttat

SEQ ID NO: 2182 - DNA, 20 bp, synthetic construct
  source 1..20: mol_type = other DNA
ttatgagtgaattattttct

SEQ ID NO: 2183 - DNA, 20 bp, synthetic construct
  source 1..20: mol_type = other DNA
tgctctgaaaagcgaagcca

SEQ ID NO: 2184 - DNA, 20 bp, synthetic construct
  source 1..20: mol_type = other DNA
ggttcgccataatgactgct

SEQ ID NO: 2185 - DNA, 20 bp, synthetic construct
  source 1..20: mol_type = other DNA
caaggttcgccataatgact

SEQ ID NO: 2186 - DNA, 20 bp, synthetic construct
  source 1..20: mol_type = other DNA
gttccatcctccaggcttcg

SEQ ID NO: 2187 - DNA, 20 bp, synthetic construct
  source 1..20: mol_type = other DNA
tgttccatcctccaggcttc

SEQ ID NO: 2188 - DNA, 20 bp, synthetic construct
  source 1..20: mol_type = other DNA
tgcccccagtgttccatcct

SEQ ID NO: 2189 - DNA, 20 bp, synthetic construct
  source 1..20: mol_type = other DNA
ctgcccccagtgttccatcc

SEQ ID NO: 2190 - DNA, 20 bp, synthetic construct
  source 1..20: mol_type = other DNA
ctatgttttccagtgcccat

SEQ ID NO: 2191 - DNA, 20 bp, synthetic construct
  source 1..20: mol_type = other DNA
ctctatgttttccagtgccc

SEQ ID NO: 2192 - DNA, 20 bp, synthetic construct
  source 1..20: mol_type = other DNA
atttgctgttatacttttac

SEQ ID NO: 2193 - DNA, 20 bp, synthetic construct
  source 1..20: mol_type = other DNA
tatttgctgttatactttta

SEQ ID NO: 2194 - DNA, 20 bp, synthetic construct
  source 1..20: mol_type = other DNA
ccaaaaataagtccagatta

SEQ ID NO: 2195 - DNA, 20 bp, synthetic construct
  source 1..20: mol_type = other DNA
tccaaaaataagtccagatt

SEQ ID NO: 2196 - DNA, 20 bp, synthetic construct
  source 1..20: mol_type = other DNA
caaaggtatttcagactgtt

SEQ ID NO: 2197 - DNA, 20 bp, synthetic construct
  source 1..20: mol_type = other DNA
gcaaaggtatttcagactgt

SEQ ID NO: 2198 - DNA, 20 bp, synthetic construct
  source 1..20: mol_type = other DNA
attagtatactgagctctag

SEQ ID NO: 2199 - DNA, 20 bp, synthetic construct
  source 1..20: mol_type = other DNA
tagggcattagtatactgag

SEQ ID NO: 2200 - DNA, 20 bp, synthetic construct
  source 1..20: mol_type = other DNA
ggttttcttaaaatggaaaa

SEQ ID NO: 2201 - DNA, 20 bp, synthetic construct
  source 1..20: mol_type = other DNA
gtcgggttttcttaaaatgg

SEQ ID NO: 2202 - DNA, 20 bp, synthetic construct
  source 1..20: mol_type = other DNA
agaggttcagtgttgtgaca

SEQ ID NO: 2203 - DNA, 20 bp, synthetic construct
  source 1..20: mol_type = other DNA
tatgtcctctagccagaggt

SEQ ID NO: 2204 - DNA, 20 bp, synthetic construct
  source 1..20: mol_type = other DNA
tatgttcactgtgaatatgt

SEQ ID NO: 2205 - DNA, 20 bp, synthetic construct
  source 1..20: mol_type = other DNA
catatatgttacagttatgt

SEQ ID NO: 2206 - DNA, 20 bp, synthetic construct
  source 1..20: mol_type = other DNA
tgatttcaagtcccagaagc

SEQ ID NO: 2207 - DNA, 20 bp, synthetic construct
  source 1..20: mol_type = other DNA
acatatagggtcctttaaac

SEQ ID NO: 2208 - DNA, 20 bp, synthetic construct
  source 1..20: mol_type = other DNA
aaaggaatgccacatatagg

SEQ ID NO: 2209 - DNA, 20 bp, synthetic construct
  source 1..20: mol_type = other DNA
agaaaggaatgccacatata

SEQ ID NO: 2210 - DNA, 20 bp, synthetic construct
  source 1..20: mol_type = other DNA
acttttcagctgccttaatt

SEQ ID NO: 2211 - DNA, 20 bp, synthetic construct
  source 1..20: mol_type = other DNA
tacttttcagctgccttaat

SEQ ID NO: 2212 - DNA, 20 bp, synthetic construct
  source 1..20: mol_type = other DNA
aaaatcattctggtttccag

SEQ ID NO: 2213 - DNA, 20 bp, synthetic construct
  source 1..20: mol_type = other DNA
caaaatcattctggtttcca

SEQ ID NO: 2214 - DNA, 20 bp, synthetic construct
  source 1..20: mol_type = other DNA
tttgcacactgaccattttt

SEQ ID NO: 2215 - DNA, 20 bp, synthetic construct
  source 1..20: mol_type = other DNA
ctttgcacactgaccatttt

SEQ ID NO: 2216 - DNA, 20 bp, synthetic construct
  source 1..20: mol_type = other DNA
tggtttttgacaattatgag

SEQ ID NO: 2217 - DNA, 20 bp, synthetic construct
  source 1..20: mol_type = other DNA
ctggtttttgacaattatga

SEQ ID NO: 2218 - DNA, 20 bp, synthetic construct
  source 1..20: mol_type = other DNA
tcatctccaacctaagatat

SEQ ID NO: 2219 - DNA, 20 bp, synthetic construct
  source 1..20: mol_type = other DNA
ttctttttccacttcaaatc

SEQ ID NO: 2220 - DNA, 20 bp, synthetic construct
  source 1..20: mol_type = other DNA
gggaataattttactttaat

SEQ ID NO: 2221 - DNA, 20 bp, synthetic construct
  source 1..20: mol_type = other DNA
agggaataattttactttaa

SEQ ID NO: 2222 - DNA, 20 bp, synthetic construct
  source 1..20: mol_type = other DNA
ccaataataacattgcagaa

SEQ ID NO: 2223 - DNA, 20 bp, synthetic construct
  source 1..20: mol_type = other DNA
agccaataataacattgcag

SEQ ID NO: 2224 - DNA, 20 bp, synthetic construct
  source 1..20: mol_type = other DNA
tttcccacatattaagtatt

SEQ ID NO: 2225 - DNA, 20 bp, synthetic construct
  source 1..20: mol_type = other DNA
agggtttcccacatattaag

SEQ ID NO: 2226 - DNA, 20 bp, synthetic construct
  source 1..20: mol_type = other DNA
ttcagtgcacattgtaagcc

SEQ ID NO: 2227 - DNA, 20 bp, synthetic construct
  source 1..20: mol_type = other DNA
ttccagaagtttaacatatt

SEQ ID NO: 2228 - DNA, 20 bp, synthetic construct
  source 1..20: mol_type = other DNA
agcgttgttgatttttccag

SEQ ID NO: 2229 - DNA, 20 bp, synthetic construct
  source 1..20: mol_type = other DNA
tttttttcactgtaagacct

SEQ ID NO: 2230 - DNA, 20 bp, synthetic construct
  source 1..20: mol_type = other DNA
agacttgtgttagatataaa

SEQ ID NO: 2231 - DNA, 20 bp, synthetic construct
  source 1..20: mol_type = other DNA
cggtgtggaagacttgtgtt

SEQ ID NO: 2232 - DNA, 20 bp, synthetic construct
  source 1..20: mol_type = other DNA
attttaatagatgtaaaatg

SEQ ID NO: 2233 - DNA, 20 bp, synthetic construct
  source 1..20: mol_type = other DNA
caggtaagttctcaggagtg

SEQ ID NO: 2234 - DNA, 20 bp, synthetic construct
  source 1..20: mol_type = other DNA
gtttcttccattgcaggtaa

SEQ ID NO: 2235 - DNA, 20 bp, synthetic construct
  source 1..20: mol_type = other DNA
gtttgtttgtttcttccatt

SEQ ID NO: 2236 - DNA, 20 bp, synthetic construct
  source 1..20: mol_type = other DNA
tatacatttaggctcttttc

SEQ ID NO: 2237 - DNA, 20 bp, synthetic construct
  source 1..20: mol_type = other DNA
cataattttcttagctactg

SEQ ID NO: 2238 - DNA, 20 bp, synthetic construct
  source 1..20: mol_type = other DNA
ttttagtggttacataatgt

SEQ ID NO: 2239 - DNA, 20 bp, synthetic construct
  source 1..20: mol_type = other DNA
gatttttcacatatgcgttc

SEQ ID NO: 2240 - DNA, 20 bp, synthetic construct
  source 1..20: mol_type = other DNA
gtgcttttcctttcagattt

SEQ ID NO: 2241 - DNA, 20 bp, synthetic construct
  source 1..20: mol_type = other DNA
aatatattcaccaaaggaaa

SEQ ID NO: 2242 - DNA, 20 bp, synthetic construct
  source 1..20: mol_type = other DNA
atctgttgtggttcagctaa

SEQ ID NO: 2243 - DNA, 20 bp, synthetic construct
  source 1..20: mol_type = other DNA
tatgtacaatctgttgtggt

SEQ ID NO: 2244 - DNA, 20 bp, synthetic construct
  source 1..20: mol_type = other DNA
cttctgttatgttattattg

SEQ ID NO: 2245 - DNA, 20 bp, synthetic construct
  source 1..20: mol_type = other DNA
taattagttacatcgggaag

SEQ ID NO: 2246 - DNA, 20 bp, synthetic construct
  source 1..20: mol_type = other DNA
tagtaagaacttatcccaag

SEQ ID NO: 2247 - DNA, 20 bp, synthetic construct
  source 1..20: mol_type = other DNA
atggcactttctttttattt

SEQ ID NO: 2248 - DNA, 20 bp, synthetic construct
  source 1..20: mol_type = other DNA
cacaggctatctttctattt

SEQ ID NO: 2249 - DNA, 20 bp, synthetic construct
  source 1..20: mol_type = other DNA
gatttttggacgggagattt

SEQ ID NO: 2250 - DNA, 20 bp, synthetic construct
  source 1..20: mol_type = other DNA
ggatctcttagatttttgga

SEQ ID NO: 2251 - DNA, 20 bp, synthetic construct
  source 1..20: mol_type = other DNA
tttgctttggatctcttaga

SEQ ID NO: 2252 - DNA, 20 bp, synthetic construct
  source 1..20: mol_type = other DNA
cagggtggtagtttttcaaa

SEQ ID NO: 2253 - DNA, 20 bp, synthetic construct
  source 1..20: mol_type = other DNA
attaataggttaggaagaaa

SEQ ID NO: 2254 - DNA, 20 bp, synthetic construct
  source 1..20: mol_type = other DNA
ggagctctattaataggtta

SEQ ID NO: 2255 - DNA, 20 bp, synthetic construct
  source 1..20: mol_type = other DNA
gtgggagtatcaatttaagc

SEQ ID NO: 2256 - DNA, 20 bp, synthetic construct
  source 1..20: mol_type = other DNA
tgttgtttcttttctggtag

SEQ ID NO: 2257 - DNA, 20 bp, synthetic construct
  source 1..20: mol_type = other DNA
ttatttcctctgtgcttatt

SEQ ID NO: 2258 - DNA, 20 bp, synthetic construct
  source 1..20: mol_type = other DNA
tttttggaggctcttttagg

SEQ ID NO: 2259 - DNA, 20 bp, synthetic construct
  source 1..20: mol_type = other DNA
ccatataccatgtacagttc

SEQ ID NO: 2260 - DNA, 20 bp, synthetic construct
  source 1..20: mol_type = other DNA
ggatgatctgcaattgtttt

SEQ ID NO: 2261 - DNA, 20 bp, synthetic construct
  source 1..20: mol_type = other DNA
gccaaggttcgccataatga

SEQ ID NO: 2262 - DNA, 20 bp, synthetic construct
  source 1..20: mol_type = other DNA
agtgttccatcctccaggct

SEQ ID NO: 2263 - DNA, 20 bp, synthetic construct
  source 1..20: mol_type = other DNA
gctgcccccagtgttccatc

SEQ ID NO: 2264 - DNA, 20 bp, synthetic construct
  source 1..20: mol_type = other DNA
actctatgttttccagtgcc

SEQ ID NO: 2265 - DNA, 20 bp, synthetic construct
  source 1..20: mol_type = other DNA
ttatttgctgttatactttt

SEQ ID NO: 2266 - DNA, 20 bp, synthetic construct
  source 1..20: mol_type = other DNA
agtccaaaaataagtccaga

SEQ ID NO: 2267 - DNA, 20 bp, synthetic construct
  source 1..20: mol_type = other DNA
aggcaaaggtatttcagact

SEQ ID NO: 2268 - DNA, 20 bp, synthetic construct
  source 1..20: mol_type = other DNA
atagggcattagtatactga

SEQ ID NO: 2269 - DNA, 20 bp, synthetic construct
  source 1..20: mol_type = other DNA
tgtcgggttttcttaaaatg

SEQ ID NO: 2270 - DNA, 20 bp, synthetic construct
  source 1..20: mol_type = other DNA
aatatgtcctctagccagag

SEQ ID NO: 2271 - DNA, 20 bp, synthetic construct
  source 1..20: mol_type = other DNA
tcatatatgttacagttatg

SEQ ID NO: 2272 - DNA, 20 bp, synthetic construct
  source 1..20: mol_type = other DNA
cacatatagggtcctttaaa

SEQ ID NO: 2273 - DNA, 20 bp, synthetic construct
  source 1..20: mol_type = other DNA
ttaattacctatagtttaaa

SEQ ID NO: 2274 - DNA, 20 bp, synthetic construct
  source 1..20: mol_type = other DNA
ttacttttcagctgccttaa

SEQ ID NO: 2275 - DNA, 20 bp, synthetic construct
  source 1..20: mol_type = other DNA
ctcctgtatgtcaaaatcat

SEQ ID NO: 2276 - DNA, 20 bp, synthetic construct
  source 1..20: mol_type = other DNA
aatgcaagcagttcttttct

SEQ ID NO: 2277 - DNA, 20 bp, synthetic construct
  source 1..20: mol_type = other DNA
tctggtttttgacaattatg

SEQ ID NO: 2278 - DNA, 20 bp, synthetic construct
  source 1..20: mol_type = other DNA
tttctttttccacttcaaat

SEQ ID NO: 2279 - DNA, 20 bp, synthetic construct
  source 1..20: mol_type = other DNA
caattcagggaataatttta

SEQ ID NO: 2280 - DNA, 20 bp, synthetic construct
  source 1..20: mol_type = other DNA
caagccaataataacattgc

SEQ ID NO: 2281 - DNA, 20 bp, synthetic construct
  source 1..20: mol_type = other DNA
cacattgtaagcctaaggac

SEQ ID NO: 2282 - DNA, 20 bp, synthetic construct
  source 1..20: mol_type = other DNA
tttttccagaagtttaacat

SEQ ID NO: 2283 - DNA, 20 bp, synthetic construct
  source 1..20: mol_type = other DNA
agagcgttgttgatttttcc

SEQ ID NO: 2284 - DNA, 20 bp, synthetic construct
  source 1..20: mol_type = other DNA
ttttttcctttcttctacaa

SEQ ID NO: 2285 - DNA, 20 bp, synthetic construct
  source 1..20: mol_type = other DNA
gctttttttcactgtaagac

SEQ ID NO: 2286 - DNA, 20 bp, synthetic construct
  source 1..20: mol_type = other DNA
agctttttttcactgtaaga

SEQ ID NO: 2287 - DNA, 20 bp, synthetic construct
  source 1..20: mol_type = other DNA
aagacttgtgttagatataa

SEQ ID NO: 2288 - DNA, 20 bp, synthetic construct
  source 1..20: mol_type = other DNA
gaagacttgtgttagatata

SEQ ID NO: 2289 - DNA, 20 bp, synthetic construct
  source 1..20: mol_type = other DNA
tcatcattttgccatttatc

SEQ ID NO: 2290 - DNA, 20 bp, synthetic construct
  source 1..20: mol_type = other DNA
ctcatcattttgccatttat

SEQ ID NO: 2291 - DNA, 20 bp, synthetic construct
  source 1..20: mol_type = other DNA
ttattttaatagatgtaaaa

SEQ ID NO: 2292 - DNA, 20 bp, synthetic construct
  source 1..20: mol_type = other DNA
ggttattttaatagatgtaa

SEQ ID NO: 2293 - DNA, 20 bp, synthetic construct
  source 1..20: mol_type = other DNA
tgcaggtaagttctcaggag

SEQ ID NO: 2294 - DNA, 20 bp, synthetic construct
  source 1..20: mol_type = other DNA
attgcaggtaagttctcagg

SEQ ID NO: 2295 - DNA, 20 bp, synthetic construct
  source 1..20: mol_type = other DNA
ttgtttcttccattgcaggt

SEQ ID NO: 2296 - DNA, 20 bp, synthetic construct
  source 1..20: mol_type = other DNA
tttgtttcttccattgcagg

SEQ ID NO: 2297 - DNA, 20 bp, synthetic construct
  source 1..20: mol_type = other DNA
ttgtttgtttgtttcttcca

SEQ ID NO: 2298 - DNA, 20 bp, synthetic construct
  source 1..20: mol_type = other DNA
ggctcttttccaggtgttct

SEQ ID NO: 2299 - DNA, 20 bp, synthetic construct
  source 1..20: mol_type = other DNA
ttatacatttaggctctttt

SEQ ID NO: 2300 - DNA, 20 bp, synthetic construct
  source 1..20: mol_type = other DNA
tgttatacatttaggctctt

SEQ ID NO: 2301 - DNA, 20 bp, synthetic construct
  source 1..20: mol_type = other DNA
tcataattttcttagctact

SEQ ID NO: 2302 - DNA, 20 bp, synthetic construct
  source 1..20: mol_type = other DNA
gtgtcataattttcttagct

SEQ ID NO: 2303 - DNA, 20 bp, synthetic construct
  source 1..20: mol_type = other DNA
gtttttccccacatatcaca

SEQ ID NO: 2304 - DNA, 20 bp, synthetic construct
  source 1..20: mol_type = other DNA
gtcagtttttccccacatat

SEQ ID NO: 2305 - DNA, 20 bp, synthetic construct
  source 1..20: mol_type = other DNA
agatttttcacatatgcgtt

SEQ ID NO: 2306 - DNA, 20 bp, synthetic construct
  source 1..20: mol_type = other DNA
cagatttttcacatatgcgt

SEQ ID NO: 2307 - DNA, 20 bp, synthetic construct
  source 1..20: mol_type = other DNA
ctgtgcttttcctttcagat

SEQ ID NO: 2308 - DNA, 20 bp, synthetic construct
  source 1..20: mol_type = other DNA
ttctgtgcttttcctttcag

SEQ ID NO: 2309 - DNA, 20 bp, synthetic construct
  source 1..20: mol_type = other DNA
caatatattcaccaaaggaa

SEQ ID NO: 2310 - DNA, 20 bp, synthetic construct
  source 1..20: mol_type = other DNA
agcaatatattcaccaaagg

SEQ ID NO: 2311 - DNA, 20 bp, synthetic construct
  source 1..20: mol_type = other DNA
aatctgttgtggttcagcta

SEQ ID NO: 2312 - DNA, 20 bp, synthetic construct
  source 1..20: mol_type = other DNA
caatctgttgtggttcagct

SEQ ID NO: 2313 - DNA, 20 bp, synthetic construct
  source 1..20: mol_type = other DNA
atgttattattgttatttga

SEQ ID NO: 2314 - DNA, 20 bp, synthetic construct
  source 1..20: mol_type = other DNA
ttatgttattattgttattt

SEQ ID NO: 2315 - DNA, 20 bp, synthetic construct
  source 1..20: mol_type = other DNA
aacttctgttatgttattat

SEQ ID NO: 2316 - DNA, 20 bp, synthetic construct
  source 1..20: mol_type = other DNA
cagagaatctttcaccttgg

SEQ ID NO: 2317 - DNA, 20 bp, synthetic construct
  source 1..20: mol_type = other DNA
ttaattagttacatcgggaa

SEQ ID NO: 2318 - DNA, 20 bp, synthetic construct
  source 1..20: mol_type = other DNA
aagcttaattagttacatcg

SEQ ID NO: 2319 - DNA, 20 bp, synthetic construct
  source 1..20: mol_type = other DNA
gagctagtaagaacttatcc

SEQ ID NO: 2320 - DNA, 20 bp, synthetic construct
  source 1..20: mol_type = other DNA
cagagctagtaagaacttat

SEQ ID NO: 2321 - DNA, 20 bp, synthetic construct
  source 1..20: mol_type = other DNA
aaatggcactttctttttat

SEQ ID NO: 2322 - DNA, 20 bp, synthetic construct
  source 1..20: mol_type = other DNA
ctttctatttgtgtctcctt

SEQ ID NO: 2323 - DNA, 20 bp, synthetic construct
  source 1..20: mol_type = other DNA
gcacaggctatctttctatt

SEQ ID NO: 2324 - DNA, 20 bp, synthetic construct
  source 1..20: mol_type = other DNA
gagcacaggctatctttcta

SEQ ID NO: 2325 - DNA, 20 bp, synthetic construct
  source 1..20: mol_type = other DNA
tagatttttggacgggagat

SEQ ID NO: 2326 - DNA, 20 bp, synthetic construct
  source 1..20: mol_type = other DNA
ttagatttttggacgggaga

SEQ ID NO: 2327 - DNA, 20 bp, synthetic construct
  source 1..20: mol_type = other DNA
ttggatctcttagatttttg

SEQ ID NO: 2328 - DNA, 20 bp, synthetic construct
  source 1..20: mol_type = other DNA
tgtttgctttggatctctta

SEQ ID NO: 2329 - DNA, 20 bp, synthetic construct
  source 1..20: mol_type = other DNA
atttttttacctggaaaatc

SEQ ID NO: 2330 - DNA, 20 bp, synthetic construct
  source 1..20: mol_type = other DNA
tattaataggttaggaagaa

SEQ ID NO: 2331 - DNA, 20 bp, synthetic construct
  source 1..20: mol_type = other DNA
caggagctctattaataggt

SEQ ID NO: 2332 - DNA, 20 bp, synthetic construct
  source 1..20: mol_type = other DNA
agtgggagtatcaatttaag

SEQ ID NO: 2333 - DNA, 20 bp, synthetic construct
  source 1..20: mol_type = other DNA
tgttgttgtttcttttctgg

SEQ ID NO: 2334 - DNA, 20 bp, synthetic construct
  source 1..20: mol_type = other DNA
gttatttcctctgtgcttat

SEQ ID NO: 2335 - DNA, 20 bp, synthetic construct
  source 1..20: mol_type = other DNA
gtttttggaggctcttttag

SEQ ID NO: 2336 - DNA, 20 bp, synthetic construct
  source 1..20: mol_type = other DNA
tcaccatataccatgtacag

SEQ ID NO: 2337 - DNA, 20 bp, synthetic construct
  source 1..20: mol_type = other DNA
ctgggatgatctgcaattgt

SEQ ID NO: 2338 - DNA, 20 bp, synthetic construct
  source 1..20: mol_type = other DNA
cagccaaggttcgccataat

SEQ ID NO: 2339 - DNA, 20 bp, synthetic construct
  source 1..20: mol_type = other DNA
ccatcctccaggcttcgggc

SEQ ID NO: 2340 - DNA, 20 bp, synthetic construct
  source 1..20: mol_type = other DNA
ccagtgttccatcctccagg

SEQ ID NO: 2341 - DNA, 20 bp, synthetic construct
  source 1..20: mol_type = other DNA
cccccagtgttccatcctcc

SEQ ID NO: 2342 - DNA, 20 bp, synthetic construct
  source 1..20: mol_type = other DNA
gttttccagtgcccatcagt

SEQ ID NO: 2343 - DNA, 20 bp, synthetic construct
  source 1..20: mol_type = other DNA
atgttttccagtgcccatca

SEQ ID NO: 2344 - DNA, 20 bp, synthetic construct
  source 1..20: mol_type = other DNA
tactctatgttttccagtgc

SEQ ID NO: 2345 - DNA, 20 bp, synthetic construct
  source 1..20: mol_type = other DNA
tgctgttatacttttactgg

SEQ ID NO: 2346 - DNA, 20 bp, synthetic construct
  source 1..20: mol_type = other DNA
ggttatttgctgttatactt

SEQ ID NO: 2347 - DNA, 20 bp, synthetic construct
  source 1..20: mol_type = other DNA
aaaataagtccagattaacc

SEQ ID NO: 2348 - DNA, 20 bp, synthetic construct
  source 1..20: mol_type = other DNA
aagtccaaaaataagtccag

SEQ ID NO: 2349 - DNA, 20 bp, synthetic construct
  source 1..20: mol_type = other DNA
aggtatttcagactgttctg

SEQ ID NO: 2350 - DNA, 20 bp, synthetic construct
  source 1..20: mol_type = other DNA
caggcaaaggtatttcagac

SEQ ID NO: 2351 - DNA, 20 bp, synthetic construct
  source 1..20: mol_type = other DNA
ccaggcaaaggtatttcaga

SEQ ID NO: 2352 - DNA, 20 bp, synthetic construct
  source 1..20: mol_type = other DNA
gatagggcattagtatactg

SEQ ID NO: 2353 - DNA, 20 bp, synthetic construct
  source 1..20: mol_type = other DNA
aagatagggcattagtatac

SEQ ID NO: 2354 - DNA, 20 bp, synthetic construct
  source 1..20: mol_type = other DNA
gttgtcgggttttcttaaaa

SEQ ID NO: 2355 - DNA, 20 bp, synthetic construct
  source 1..20: mol_type = other DNA
cagtgttgtgacaatattta

SEQ ID NO: 2356 - DNA, 20 bp, synthetic construct
  source 1..20: mol_type = other DNA
gaatatgtcctctagccaga

SEQ ID NO: 2357 - DNA, 20 bp, synthetic construct
  source 1..20: mol_type = other DNA
actgtgaatatgtcctctag

SEQ ID NO: 2358 - DNA, 20 bp, synthetic construct
  source 1..20: mol_type = other DNA
agcctttcatatatgttaca

SEQ ID NO: 2359 - DNA, 20 bp, synthetic construct
  source 1..20: mol_type = other DNA
gaagcctttcatatatgtta

SEQ ID NO: 2360 - DNA, 20 bp, synthetic construct
  source 1..20: mol_type = other DNA
tgccacatatagggtccttt

SEQ ID NO: 2361 - DNA, 20 bp, synthetic construct
  source 1..20: mol_type = other DNA
agctgccttaattacctata

SEQ ID NO: 2362 - DNA, 20 bp, synthetic construct
  source 1..20: mol_type = other DNA
aatttacttttcagctgcct

SEQ ID NO: 2363 - DNA, 20 bp, synthetic construct
  source 1..20: mol_type = other DNA
ggtgctttcacaactgcagc

SEQ ID NO: 2364 - DNA, 20 bp, synthetic construct
  source 1..20: mol_type = other DNA
gaaatgcaagcagttctttt

SEQ ID NO: 2365 - DNA, 20 bp, synthetic construct
  source 1..20: mol_type = other DNA
attctggtttttgacaatta

SEQ ID NO: 2366 - DNA, 20 bp, synthetic construct
  source 1..20: mol_type = other DNA
atttctttttccacttcaaa

SEQ ID NO: 2367 - DNA, 20 bp, synthetic construct
  source 1..20: mol_type = other DNA
taataacattgcagaaaagt

SEQ ID NO: 2368 - DNA, 20 bp, synthetic construct
  source 1..20: mol_type = other DNA
ccacatattaagtattcagt

SEQ ID NO: 2369 - DNA, 20 bp, synthetic construct
  source 1..20: mol_type = other DNA
gcacattgtaagcctaagga

SEQ ID NO: 2370 - DNA, 20 bp, synthetic construct
  source 1..20: mol_type = other DNA
tgatttttccagaagtttaa

SEQ ID NO: 2371 - DNA, 20 bp, synthetic construct
  source 1..20: mol_type = other DNA
attttttcctttcttctaca

SEQ ID NO: 2372 - DNA, 20 bp, synthetic construct
  source 1..20: mol_type = other DNA
ttactggttagctttttttc

SEQ ID NO: 2373 - DNA, 20 bp, synthetic construct
  source 1..20: mol_type = other DNA
ggaagacttgtgttagatat

SEQ ID NO: 2374 - DNA, 20 bp, synthetic construct
  source 1..20: mol_type = other DNA
gactcatcattttgccattt

SEQ ID NO: 2375 - DNA, 20 bp, synthetic construct
  source 1..20: mol_type = other DNA
tttggttattttaatagatg

SEQ ID NO: 2376 - DNA, 20 bp, synthetic construct
  source 1..20: mol_type = other DNA
cattgcaggtaagttctcag

SEQ ID NO: 2377 - DNA, 20 bp, synthetic construct
  source 1..20: mol_type = other DNA
gtttgtttcttccattgcag

SEQ ID NO: 2378 - DNA, 20 bp, synthetic construct
  source 1..20: mol_type = other DNA
catttaggctcttttccagg

SEQ ID NO: 2379 - DNA, 20 bp, synthetic construct
  source 1..20: mol_type = other DNA
cctggtgttatacatttagg

SEQ ID NO: 2380 - DNA, 20 bp, synthetic construct
  source 1..20: mol_type = other DNA
ttacataatgttcatttcag

SEQ ID NO: 2381 - DNA, 20 bp, synthetic construct
  source 1..20: mol_type = other DNA
tttacttgtcagtttttccc

SEQ ID NO: 2382 - DNA, 20 bp, synthetic construct
  source 1..20: mol_type = other DNA
tcctttcagatttttcacat

SEQ ID NO: 2383 - DNA, 20 bp, synthetic construct
  source 1..20: mol_type = other DNA
ttttctgtgcttttcctttc

SEQ ID NO: 2384 - DNA, 20 bp, synthetic construct
  source 1..20: mol_type = other DNA
gtgagagcaatatattcacc

SEQ ID NO: 2385 - DNA, 20 bp, synthetic construct
  source 1..20: mol_type = other DNA
tacaatctgttgtggttcag

SEQ ID NO: 2386 - DNA, 20 bp, synthetic construct
  source 1..20: mol_type = other DNA
gttatgttattattgttatt

SEQ ID NO: 2387 - DNA, 20 bp, synthetic construct
  source 1..20: mol_type = other DNA
tcagagaatctttcaccttg

SEQ ID NO: 2388 - DNA, 20 bp, synthetic construct
  source 1..20: mol_type = other DNA
ttgaagcttaattagttaca

SEQ ID NO: 2389 - DNA, 20 bp, synthetic construct
  source 1..20: mol_type = other DNA
cactttctttttatttcttt

SEQ ID NO: 2390 - DNA, 20 bp, synthetic construct
  source 1..20: mol_type = other DNA
atctttctatttgtgtctcc

SEQ ID NO: 2391 - DNA, 20 bp, synthetic construct
  source 1..20: mol_type = other DNA
tgagcacaggctatctttct

SEQ ID NO: 2392 - DNA, 20 bp, synthetic construct
  source 1..20: mol_type = other DNA
cttagatttttggacgggag

SEQ ID NO: 2393 - DNA, 20 bp, synthetic construct
  source 1..20: mol_type = other DNA
tttggatctcttagattttt

SEQ ID NO: 2394 - DNA, 20 bp, synthetic construct
  source 1..20: mol_type = other DNA
ctttggatctcttagatttt

SEQ ID NO: 2395 - DNA, 20 bp, synthetic construct
  source 1..20: mol_type = other DNA
gtttttcaaatcaacaaatc

SEQ ID NO: 2396 - DNA, 20 bp, synthetic construct
  source 1..20: mol_type = other DNA
tagtttttcaaatcaacaaa

SEQ ID NO: 2397 - DNA, 20 bp, synthetic construct
  source 1..20: mol_type = other DNA
taatttttttacctggaaaa

SEQ ID NO: 2398 - DNA, 20 bp, synthetic construct
  source 1..20: mol_type = other DNA
ataatttttttacctggaaa

SEQ ID NO: 2399 - DNA, 20 bp, synthetic construct
  source 1..20: mol_type = other DNA
ctattaataggttaggaaga

SEQ ID NO: 2400 - DNA, 20 bp, synthetic construct
  source 1..20: mol_type = other DNA
tctattaataggttaggaag

SEQ ID NO: 2401 - DNA, 20 bp, synthetic construct
  source 1..20: mol_type = other DNA
tcaggagctctattaatagg

SEQ ID NO: 2402 - DNA, 20 bp, synthetic construct
  source 1..20: mol_type = other DNA
gtatcaatttaagcaattgt

SEQ ID NO: 2403 - DNA, 20 bp, synthetic construct
  source 1..20: mol_type = other DNA
aagtgggagtatcaatttaa

SEQ ID NO: 2404 - DNA, 20 bp, synthetic construct
  source 1..20: mol_type = other DNA
tcaagtgggagtatcaattt

SEQ ID NO: 2405 - DNA, 20 bp, synthetic construct
  source 1..20: mol_type = other DNA
ttgttgttgtttcttttctg

SEQ ID NO: 2406 - DNA, 20 bp, synthetic construct
  source 1..20: mol_type = other DNA
tttgttgttgtttcttttct

SEQ ID NO: 2407 - DNA, 20 bp, synthetic construct
  source 1..20: mol_type = other DNA
tatgttatttcctctgtgct

SEQ ID NO: 2408 - DNA, 20 bp, synthetic construct
  source 1..20: mol_type = other DNA
tattatgttatttcctctgt

SEQ ID NO: 2409 - DNA, 20 bp, synthetic construct
  source 1..20: mol_type = other DNA
gggtttttggaggctctttt

SEQ ID NO: 2410 - DNA, 20 bp, synthetic construct
  source 1..20: mol_type = other DNA
ataccatgtacagttcaatg

SEQ ID NO: 2411 - DNA, 20 bp, synthetic construct
  source 1..20: mol_type = other DNA
ttcaccatataccatgtaca

SEQ ID NO: 2412 - DNA, 20 bp, synthetic construct
  source 1..20: mol_type = other DNA
aattcaccatataccatgta

SEQ ID NO: 2413 - DNA, 20 bp, synthetic construct
  source 1..20: mol_type = other DNA
gctgggatgatctgcaattg

SEQ ID NO: 2414 - DNA, 20 bp, synthetic construct
  source 1..20: mol_type = other DNA
gtgctgggatgatctgcaat

SEQ ID NO: 2415 - DNA, 20 bp, synthetic construct
  source 1..20: mol_type = other DNA
ttccatcctccaggcttcgg

SEQ ID NO: 2416 - DNA, 20 bp, synthetic construct
  source 1..20: mol_type = other DNA
gcccccagtgttccatcctc

SEQ ID NO: 2417 - DNA, 20 bp, synthetic construct
  source 1..20: mol_type = other DNA
tatgttttccagtgcccatc

SEQ ID NO: 2418 - DNA, 20 bp, synthetic construct
  source 1..20: mol_type = other DNA
ttgctgttatacttttactg

SEQ ID NO: 2419 - DNA, 20 bp, synthetic construct
  source 1..20: mol_type = other DNA
caaaaataagtccagattaa

SEQ ID NO: 2420 - DNA, 20 bp, synthetic construct
  source 1..20: mol_type = other DNA
aaaggtatttcagactgttc

SEQ ID NO: 2421 - DNA, 20 bp, synthetic construct
  source 1..20: mol_type = other DNA
atccaggcaaaggtatttca

SEQ ID NO: 2422 - DNA, 20 bp, synthetic construct
  source 1..20: mol_type = other DNA
tttcttaaaatggaaaatat

SEQ ID NO: 2423 - DNA, 20 bp, synthetic construct
  source 1..20: mol_type = other DNA
ttcagtgttgtgacaatatt

SEQ ID NO: 2424 - DNA, 20 bp, synthetic construct
  source 1..20: mol_type = other DNA
cactgtgaatatgtcctcta

SEQ ID NO: 2425 - DNA, 20 bp, synthetic construct
  source 1..20: mol_type = other DNA
gatttcaagtcccagaagcc

SEQ ID NO: 2426 - DNA, 20 bp, synthetic construct
  source 1..20: mol_type = other DNA
aatgccacatatagggtcct

SEQ ID NO: 2427 - DNA, 20 bp, synthetic construct
  source 1..20: mol_type = other DNA
aaggaatgccacatataggg

SEQ ID NO: 2428 - DNA, 20 bp, synthetic construct
  source 1..20: mol_type = other DNA
ttttcagctgccttaattac

SEQ ID NO: 2429 - DNA, 20 bp, synthetic construct
  source 1..20: mol_type = other DNA
cttttcagctgccttaatta

SEQ ID NO: 2430 - DNA, 20 bp, synthetic construct
  source 1..20: mol_type = other DNA
ttctggtttccaggtaaatg

SEQ ID NO: 2431 - DNA, 20 bp, synthetic construct
  source 1..20: mol_type = other DNA
cattctggtttccaggtaaa

SEQ ID NO: 2432 - DNA, 20 bp, synthetic construct
  source 1..20: mol_type = other DNA
cactgaccattttttaatta

SEQ ID NO: 2433 - DNA, 20 bp, synthetic construct
  source 1..20: mol_type = other DNA
cacactgaccattttttaat

SEQ ID NO: 2434 - DNA, 20 bp, synthetic construct
  source 1..20: mol_type = other DNA
ttgacaattatgagacagaa

SEQ ID NO: 2435 - DNA, 20 bp, synthetic construct
  source 1..20: mol_type = other DNA
ttttgacaattatgagacag

SEQ ID NO: 2436 - DNA, 20 bp, synthetic construct
  source 1..20: mol_type = other DNA
ttttagattgtctccctatt

SEQ ID NO: 2437 - DNA, 20 bp, synthetic construct
  source 1..20: mol_type = other DNA
atctccaacctaagatattt

SEQ ID NO: 2438 - DNA, 20 bp, synthetic construct
  source 1..20: mol_type = other DNA
cagaatttctttttccactt

SEQ ID NO: 2439 - DNA, 20 bp, synthetic construct
  source 1..20: mol_type = other DNA
aataattttactttaattaa

SEQ ID NO: 2440 - DNA, 20 bp, synthetic construct
  source 1..20: mol_type = other DNA
aataataacattgcagaaaa

SEQ ID NO: 2441 - DNA, 20 bp, synthetic construct
  source 1..20: mol_type = other DNA
caataataacattgcagaaa

SEQ ID NO: 2442 - DNA, 20 bp, synthetic construct
  source 1..20: mol_type = other DNA
tcccacatattaagtattca

SEQ ID NO: 2443 - DNA, 20 bp, synthetic construct
  source 1..20: mol_type = other DNA
ttcccacatattaagtattc

SEQ ID NO: 2444 - DNA, 20 bp, synthetic construct
  source 1..20: mol_type = other DNA
gtgcacattgtaagcctaag

SEQ ID NO: 2445 - DNA, 20 bp, synthetic construct
  source 1..20: mol_type = other DNA
cagtgcacattgtaagccta

SEQ ID NO: 2446 - DNA, 20 bp, synthetic construct
  source 1..20: mol_type = other DNA
cgttgttgatttttccagaa

SEQ ID NO: 2447 - DNA, 20 bp, synthetic construct
  source 1..20: mol_type = other DNA
gcgttgttgatttttccaga

SEQ ID NO: 2448 - DNA, 20 bp, synthetic construct
  source 1..20: mol_type = other DNA
tgattttttcctttcttcta

SEQ ID NO: 2449 - DNA, 20 bp, synthetic construct
  source 1..20: mol_type = other DNA
cactggtgattttttccttt

SEQ ID NO: 2450 - DNA, 20 bp, synthetic construct
  source 1..20: mol_type = other DNA
cttactggttagcttttttt

SEQ ID NO: 2451 - DNA, 20 bp, synthetic construct
  source 1..20: mol_type = other DNA
gacttgtgttagatataaat

SEQ ID NO: 2452 - DNA, 20 bp, synthetic construct
  source 1..20: mol_type = other DNA
tgtggaagacttgtgttaga

SEQ ID NO: 2453 - DNA, 20 bp, synthetic construct
  source 1..20: mol_type = other DNA
gtgtggaagacttgtgttag

SEQ ID NO: 2454 - DNA, 20 bp, synthetic construct
  source 1..20: mol_type = other DNA
tgactcatcattttgccatt

SEQ ID NO: 2455 - DNA, 20 bp, synthetic construct
  source 1..20: mol_type = other DNA
gtaaatgactcatcattttg

SEQ ID NO: 2456 - DNA, 20 bp, synthetic construct
  source 1..20: mol_type = other DNA
tattttggttattttaatag

SEQ ID NO: 2457 - DNA, 20 bp, synthetic construct
  source 1..20: mol_type = other DNA
ggtaagttctcaggagtggg

SEQ ID NO: 2458 - DNA, 20 bp, synthetic construct
  source 1..20: mol_type = other DNA
ccattgcaggtaagttctca

SEQ ID NO: 2459 - DNA, 20 bp, synthetic construct
  source 1..20: mol_type = other DNA
ttccattgcaggtaagttct

SEQ ID NO: 2460 - DNA, 20 bp, synthetic construct
  source 1..20: mol_type = other DNA
ttgtttgtttcttccattgc

SEQ ID NO: 2461 - DNA, 20 bp, synthetic construct
  source 1..20: mol_type = other DNA
tttgtttgtttcttccattg

SEQ ID NO: 2462 - DNA, 20 bp, synthetic construct
  source 1..20: mol_type = other DNA
acatttaggctcttttccag

SEQ ID NO: 2463 - DNA, 20 bp, synthetic construct
  source 1..20: mol_type = other DNA
tacatttaggctcttttcca

SEQ ID NO: 2464 - DNA, 20 bp, synthetic construct
  source 1..20: mol_type = other DNA
ccctggtgttatacatttag

SEQ ID NO: 2465 - DNA, 20 bp, synthetic construct
  source 1..20: mol_type = other DNA
tgccctggtgttatacattt

SEQ ID NO: 2466 - DNA, 20 bp, synthetic construct
  source 1..20: mol_type = other DNA
tagtggttacataatgttca

SEQ ID NO: 2467 - DNA, 20 bp, synthetic construct
  source 1..20: mol_type = other DNA
tttagtggttacataatgtt

SEQ ID NO: 2468 - DNA, 20 bp, synthetic construct
  source 1..20: mol_type = other DNA
tttttcacatatgcgttcac

SEQ ID NO: 2469 - DNA, 20 bp, synthetic construct
  source 1..20: mol_type = other DNA
atttttcacatatgcgttca

SEQ ID NO: 2470 - DNA, 20 bp, synthetic construct
  source 1..20: mol_type = other DNA
ttttcctttcagatttttca

SEQ ID NO: 2471 - DNA, 20 bp, synthetic construct
  source 1..20: mol_type = other DNA
tgcttttcctttcagatttt

SEQ ID NO: 2472 - DNA, 20 bp, synthetic construct
  source 1..20: mol_type = other DNA
atattcaccaaaggaaaatt

SEQ ID NO: 2473 - DNA, 20 bp, synthetic construct
  source 1..20: mol_type = other DNA
cttagtgagagcaatatatt

SEQ ID NO: 2474 - DNA, 20 bp, synthetic construct
  source 1..20: mol_type = other DNA
gtacaatctgttgtggttca

SEQ ID NO: 2475 - DNA, 20 bp, synthetic construct
  source 1..20: mol_type = other DNA
tgttatgttattattgttat

SEQ ID NO: 2476 - DNA, 20 bp, synthetic construct
  source 1..20: mol_type = other DNA
gaagttcagagaatctttca

SEQ ID NO: 2477 - DNA, 20 bp, synthetic construct
  source 1..20: mol_type = other DNA
aagaacttatcccaaggttg

SEQ ID NO: 2478 - DNA, 20 bp, synthetic construct
  source 1..20: mol_type = other DNA
gcactttctttttatttctt

SEQ ID NO: 2479 - DNA, 20 bp, synthetic construct
  source 1..20: mol_type = other DNA
caggctatctttctatttgt

SEQ ID NO: 2480 - DNA, 20 bp, synthetic construct
  source 1..20: mol_type = other DNA
atgagcacaggctatctttc

SEQ ID NO: 2481 - DNA, 20 bp, synthetic construct
  source 1..20: mol_type = other DNA
ctcttagatttttggacggg

SEQ ID NO: 2482 - DNA, 20 bp, synthetic construct
  source 1..20: mol_type = other DNA
tgctttggatctcttagatt

SEQ ID NO: 2483 - DNA, 20 bp, synthetic construct
  source 1..20: mol_type = other DNA
ggtagtttttcaaatcaaca

SEQ ID NO: 2484 - DNA, 20 bp, synthetic construct
  source 1..20: mol_type = other DNA
ggtataatttttttacctgg

SEQ ID NO: 2485 - DNA, 20 bp, synthetic construct
  source 1..20: mol_type = other DNA
ctctattaataggttaggaa

SEQ ID NO: 2486 - DNA, 20 bp, synthetic construct
  source 1..20: mol_type = other DNA
gagtatcaatttaagcaatt

SEQ ID NO: 2487 - DNA, 20 bp, synthetic construct
  source 1..20: mol_type = other DNA
tgtttcttttctggtagaga

SEQ ID NO: 2488 - DNA, 20 bp, synthetic construct
  source 1..20: mol_type = other DNA
tttcctctgtgcttattatt

SEQ ID NO: 2489 - DNA, 20 bp, synthetic construct
  source 1..20: mol_type = other DNA
tggaggctcttttaggtggg

SEQ ID NO: 2490 - DNA, 20 bp, synthetic construct
  source 1..20: mol_type = other DNA
atataccatgtacagttcaa

SEQ ID NO: 2491 - DNA, 20 bp, synthetic construct
  source 1..20: mol_type = other DNA
gatctgcaattgtttttctc

SEQ ID NO: 2492 - DNA, 20 bp, synthetic construct
  source 1..20: mol_type = other DNA
atatattcaccaaaggaaaa

SEQ ID NO: 2493 - DNA, 20 bp, synthetic construct
  source 1..20: mol_type = other DNA
ctgttgtggttcagctaaac

SEQ ID NO: 2494 - DNA, 20 bp, synthetic construct
  source 1..20: mol_type = other DNA
tgtacaatctgttgtggttc

SEQ ID NO: 2495 - DNA, 20 bp, synthetic construct
  source 1..20: mol_type = other DNA
ttctgttatgttattattgt

SEQ ID NO: 2496 - DNA, 20 bp, synthetic construct
  source 1..20: mol_type = other DNA
ctgaagttcagagaatcttt

SEQ ID NO: 2497 - DNA, 20 bp, synthetic construct
  source 1..20: mol_type = other DNA
agtaagaacttatcccaagg

SEQ ID NO: 2498 - DNA, 20 bp, synthetic construct
  source 1..20: mol_type = other DNA
ggcactttctttttatttct

SEQ ID NO: 2499 - DNA, 20 bp, synthetic construct
  source 1..20: mol_type = other DNA
acaggctatctttctatttg

SEQ ID NO: 2500 - DNA, 20 bp, synthetic construct
  source 1..20: mol_type = other DNA
ccatgagcacaggctatctt

SEQ ID NO: 2501 - DNA, 20 bp, synthetic construct
  source 1..20: mol_type = other DNA
atctcttagatttttggacg

SEQ ID NO: 2502 - DNA, 20 bp, synthetic construct
  source 1..20: mol_type = other DNA
ttgctttggatctcttagat

SEQ ID NO: 2503 - DNA, 20 bp, synthetic construct
  source 1..20: mol_type = other DNA
gggtggtagtttttcaaatc

SEQ ID NO: 2504 - DNA, 20 bp, synthetic construct
  source 1..20: mol_type = other DNA
aggtataatttttttacctg

SEQ ID NO: 2505 - DNA, 20 bp, synthetic construct
  source 1..20: mol_type = other DNA
gagctctattaataggttag

SEQ ID NO: 2506 - DNA, 20 bp, synthetic construct
  source 1..20: mol_type = other DNA
ggagtatcaatttaagcaat

SEQ ID NO: 2507 - DNA, 20 bp, synthetic construct
  source 1..20: mol_type = other DNA
gttgtttcttttctggtaga

SEQ ID NO: 2508 - DNA, 20 bp, synthetic construct
  source 1..20: mol_type = other DNA
tatttcctctgtgcttatta

SEQ ID NO: 2509 - DNA, 20 bp, synthetic construct
  source 1..20: mol_type = other DNA
ttttggaggctcttttaggt

SEQ ID NO: 2510 - DNA, 20 bp, synthetic construct
  source 1..20: mol_type = other DNA
catataccatgtacagttca

SEQ ID NO: 2511 - DNA, 20 bp, synthetic construct
  source 1..20: mol_type = other DNA
atgatctgcaattgtttttc

SEQ ID NO: 2512 - DNA, 20 bp, synthetic construct
  source 1..20: mol_type = other DNA
cattagtatactgagctcta

SEQ ID NO: 2513 - DNA, 20 bp, synthetic construct
  source 1..20: mol_type = other DNA
atatgtcctctagccagagg

SEQ ID NO: 2514 - DNA, 20 bp, synthetic construct
  source 1..20: mol_type = other DNA
catatagggtcctttaaaca

SEQ ID NO: 2515 - DNA, 20 bp, synthetic construct
  source 1..20: mol_type = other DNA
cattgtaagcctaaggacca

SEQ ID NO: 2516 - DNA, 20 bp, synthetic construct
  source 1..20: mol_type = other DNA
tctgttgtggttcagctaaa

SEQ ID NO: 2517 - DNA, 20 bp, synthetic construct
  source 1..20: mol_type = other DNA
aattagttacatcgggaagg

SEQ ID NO: 2518 - DNA, 20 bp, synthetic construct
  source 1..20: mol_type = other DNA
agatttttggacgggagatt

SEQ ID NO: 2519 - DNA, 20 bp, synthetic construct
  source 1..20: mol_type = other DNA
tccatcctccaggcttcggg

SEQ ID NO: 2520 - DNA, 20 bp, synthetic construct
  source 1..20: mol_type = other DNA
tgttttccagtgcccatcag

SEQ ID NO: 2521 - DNA, 20 bp, synthetic construct
  source 1..20: mol_type = other DNA
aaaaataagtccagattaac

SEQ ID NO: 2522 - DNA, 20 bp, synthetic construct
  source 1..20: mol_type = other DNA
aaggtatttcagactgttct

SEQ ID NO: 2523 - DNA, 20 bp, synthetic construct
  source 1..20: mol_type = other DNA
caatatttactcttgttgaa

SEQ ID NO: 2524 - DNA, 20 bp, synthetic construct
  source 1..20: mol_type = other DNA
cttaattacctatagtttaa

SEQ ID NO: 2525 - DNA, 20 bp, synthetic construct
  source 1..20: mol_type = other DNA
attctggtttccaggtaaat

SEQ ID NO: 2526 - DNA, 20 bp, synthetic construct
  source 1..20: mol_type = other DNA
tttgacaattatgagacaga

SEQ ID NO: 2527 - DNA, 20 bp, synthetic construct
  source 1..20: mol_type = other DNA
gaataattttactttaatta

SEQ ID NO: 2528 - DNA, 20 bp, synthetic construct
  source 1..20: mol_type = other DNA
ataataacattgcagaaaag

SEQ ID NO: 2529 - DNA, 20 bp, synthetic construct
  source 1..20: mol_type = other DNA
cccacatattaagtattcag

SEQ ID NO: 2530 - DNA, 20 bp, synthetic construct
  source 1..20: mol_type = other DNA
atttttccagaagtttaaca

SEQ ID NO: 2531 - DNA, 20 bp, synthetic construct
  source 1..20: mol_type = other DNA
ttttgccatttatctattat

SEQ ID NO: 2532 - DNA, 20 bp, synthetic construct
  source 1..20: mol_type = other DNA
aggtaagttctcaggagtgg

SEQ ID NO: 2533 - DNA, 20 bp, synthetic construct
  source 1..20: mol_type = other DNA
tgtttcttccattgcaggta

SEQ ID NO: 2534 - DNA, 20 bp, synthetic construct
  source 1..20: mol_type = other DNA
aggctcttttccaggtgttc

SEQ ID NO: 2535 - DNA, 20 bp, synthetic construct
  source 1..20: mol_type = other DNA
gttatacatttaggctcttt

SEQ ID NO: 2536 - DNA, 20 bp, synthetic construct
  source 1..20: mol_type = other DNA
ataattttcttagctactgc

SEQ ID NO: 2537 - DNA, 20 bp, synthetic construct
  source 1..20: mol_type = other DNA
cttttcctttcagatttttc

SEQ ID NO: 2538 - DNA, 20 bp, synthetic construct
  source 1..20: mol_type = other DNA
tatattcaccaaaggaaaat

SEQ ID NO: 2539 - DNA, 20 bp, synthetic construct
  source 1..20: mol_type = other DNA
tatgttattattgttatttg

SEQ ID NO: 2540 - DNA, 20 bp, synthetic construct
  source 1..20: mol_type = other DNA
taagaacttatcccaaggtt

SEQ ID NO: 2541 - DNA, 20 bp, synthetic construct
  source 1..20: mol_type = other DNA
tggatctcttagatttttgg

SEQ ID NO: 2542 - DNA, 20 bp, synthetic construct
  source 1..20: mol_type = other DNA
agtatcaatttaagcaattg

SEQ ID NO: 2543 - DNA, 20 bp, synthetic construct
  source 1..20: mol_type = other DNA
atttcctctgtgcttattat

SEQ ID NO: 2544 - DNA, 20 bp, synthetic construct
  source 1..20: mol_type = other DNA
tataccatgtacagttcaat

SEQ ID NO: 2545 - DNA, 20 bp, synthetic construct
  source 1..20: mol_type = other DNA
agccaaggttcgccataatg

SEQ ID NO: 2546 - DNA, 20 bp, synthetic construct
  source 1..20: mol_type = other DNA
agatagggcattagtatact

SEQ ID NO: 2547 - DNA, 20 bp, synthetic construct
  source 1..20: mol_type = other DNA
gaaaggaatgccacatatag

SEQ ID NO: 2548 - DNA, 20 bp, synthetic construct
  source 1..20: mol_type = other DNA
tcagtgcacattgtaagcct

SEQ ID NO: 2549 - DNA, 20 bp, synthetic construct
  source 1..20: mol_type = other DNA
atgtacaatctgttgtggtt

SEQ ID NO: 2550 - DNA, 20 bp, synthetic construct
  source 1..20: mol_type = other DNA
tgaagcttaattagttacat

SEQ ID NO: 2551 - DNA, 20 bp, synthetic construct
  source 1..20: mol_type = other DNA
ctactctatgttttccagtg

SEQ ID NO: 2552 - DNA, 20 bp, synthetic construct
  source 1..20: mol_type = other DNA
gttatttgctgttatacttt

SEQ ID NO: 2553 - DNA, 20 bp, synthetic construct
  source 1..20: mol_type = other DNA
ctaagtccaaaaataagtcc

SEQ ID NO: 2554 - DNA, 20 bp, synthetic construct
  source 1..20: mol_type = other DNA
tccaggcaaaggtatttcag

SEQ ID NO: 2555 - DNA, 20 bp, synthetic construct
  source 1..20: mol_type = other DNA
ttgtcgggttttcttaaaat

SEQ ID NO: 2556 - DNA, 20 bp, synthetic construct
  source 1..20: mol_type = other DNA
cagaggttcagtgttgtgac

SEQ ID NO: 2557 - DNA, 20 bp, synthetic construct
  source 1..20: mol_type = other DNA
ttatgttcactgtgaatatg

SEQ ID NO: 2558 - DNA, 20 bp, synthetic construct
  source 1..20: mol_type = other DNA
ccagaagcctttcatatatg

SEQ ID NO: 2559 - DNA, 20 bp, synthetic construct
  source 1..20: mol_type = other DNA
cccaaacatttgatttcaag

SEQ ID NO: 2560 - DNA, 20 bp, synthetic construct
  source 1..20: mol_type = other DNA
tcctgtatgtcaaaatcatt

SEQ ID NO: 2561 - DNA, 20 bp, synthetic construct
  source 1..20: mol_type = other DNA
aaatgcaagcagttcttttc

SEQ ID NO: 2562 - DNA, 20 bp, synthetic construct
  source 1..20: mol_type = other DNA
gcaagccaataataacattg

SEQ ID NO: 2563 - DNA, 20 bp, synthetic construct
  source 1..20: mol_type = other DNA
aagggtttcccacatattaa

SEQ ID NO: 2564 - DNA, 20 bp, synthetic construct
  source 1..20: mol_type = other DNA
ttttccagaagtttaacata

SEQ ID NO: 2565 - DNA, 20 bp, synthetic construct
  source 1..20: mol_type = other DNA
tccattgcaggtaagttctc

SEQ ID NO: 2566 - DNA, 20 bp, synthetic construct
  source 1..20: mol_type = other DNA
atacatttaggctcttttcc

SEQ ID NO: 2567 - DNA, 20 bp, synthetic construct
  source 1..20: mol_type = other DNA
gccctggtgttatacattta

SEQ ID NO: 2568 - DNA, 20 bp, synthetic construct
  source 1..20: mol_type = other DNA
tttctgtgcttttcctttca

SEQ ID NO: 2569 - DNA, 20 bp, synthetic construct
  source 1..20: mol_type = other DNA
ttagtgagagcaatatattc

SEQ ID NO: 2570 - DNA, 20 bp, synthetic construct
  source 1..20: mol_type = other DNA
acttctgttatgttattatt

SEQ ID NO: 2571 - DNA, 20 bp, synthetic construct
  source 1..20: mol_type = other DNA
tgaagttcagagaatctttc

SEQ ID NO: 2572 - DNA, 20 bp, synthetic construct
  source 1..20: mol_type = other DNA
agagctagtaagaacttatc

SEQ ID NO: 2573 - DNA, 20 bp, synthetic construct
  source 1..20: mol_type = other DNA
gtttgctttggatctcttag

SEQ ID NO: 2574 - DNA, 20 bp, synthetic construct
  source 1..20: mol_type = other DNA
agggtggtagtttttcaaat

SEQ ID NO: 2575 - DNA, 20 bp, synthetic construct
  source 1..20: mol_type = other DNA
caagtgggagtatcaattta

SEQ ID NO: 2576 - DNA, 20 bp, synthetic construct
  source 1..20: mol_type = other DNA
ggtttttggaggctctttta

SEQ ID NO: 2577 - DNA, 20 bp, synthetic construct
  source 1..20: mol_type = other DNA
tgctgggatgatctgcaatt

SEQ ID NO: 2578 - DNA, 20 bp, synthetic construct
  source 1..20: mol_type = other DNA
gccataatgactgctctgcc

SEQ ID NO: 2579 - DNA, 20 bp, synthetic construct
  source 1..20: mol_type = other DNA
atagggtcctttaaacatct

SEQ ID NO: 2580 - DNA, 20 bp, synthetic construct
  source 1..20: mol_type = other DNA
gttgtggttcagctaaacta

SEQ ID NO: 2581 - DNA, 20 bp, synthetic construct
  source 1..20: mol_type = other DNA
tttttggacgggagatttag

SEQ ID NO: 2582 - DNA, 20 bp, synthetic construct
  source 1..20: mol_type = other DNA
taataggttaggaagaaaag

SEQ ID NO: 2583 - DNA, 20 bp, synthetic construct
  source 1..20: mol_type = other DNA
ttaataggttaggaagaaaa

SEQ ID NO: 2584 - DNA, 20 bp, synthetic construct
  source 1..20: mol_type = other DNA
atcctccaggcttcgggcgc

SEQ ID NO: 2585 - DNA, 20 bp, synthetic construct
  source 1..20: mol_type = other DNA
ttatacttttactggcctgg

SEQ ID NO: 2586 - DNA, 20 bp, synthetic construct
  source 1..20: mol_type = other DNA
aataagtccagattaaccaa

SEQ ID NO: 2587 - DNA, 20 bp, synthetic construct
  source 1..20: mol_type = other DNA
gtatttcagactgttctgag

SEQ ID NO: 2588 - DNA, 20 bp, synthetic construct
  source 1..20: mol_type = other DNA
tatttactcttgttgaacag

SEQ ID NO: 2589 - DNA, 20 bp, synthetic construct
  source 1..20: mol_type = other DNA
ttcaagtcccagaagccttt

SEQ ID NO: 2590 - DNA, 20 bp, synthetic construct
  source 1..20: mol_type = other DNA
tttcaagtcccagaagcctt

SEQ ID NO: 2591 - DNA, 20 bp, synthetic construct
  source 1..20: mol_type = other DNA
aattacctatagtttaaaga

SEQ ID NO: 2592 - DNA, 20 bp, synthetic construct
  source 1..20: mol_type = other DNA
ctggtttccaggtaaatgga

SEQ ID NO: 2593 - DNA, 20 bp, synthetic construct
  source 1..20: mol_type = other DNA
tttcacaactgcagctctcc

SEQ ID NO: 2594 - DNA, 20 bp, synthetic construct
  source 1..20: mol_type = other DNA
gacaattatgagacagaaat

SEQ ID NO: 2595 - DNA, 20 bp, synthetic construct
  source 1..20: mol_type = other DNA
ctccaacctaagatattttt

SEQ ID NO: 2596 - DNA, 20 bp, synthetic construct
  source 1..20: mol_type = other DNA
ataacattgcagaaaagtaa

SEQ ID NO: 2597 - DNA, 20 bp, synthetic construct
  source 1..20: mol_type = other DNA
tttttcactgtaagaccttc

SEQ ID NO: 2598 - DNA, 20 bp, synthetic construct
  source 1..20: mol_type = other DNA
ttttttcactgtaagacctt

SEQ ID NO: 2599 - DNA, 20 bp, synthetic construct
  source 1..20: mol_type = other DNA
cttgtgttagatataaataa

SEQ ID NO: 2600 - DNA, 20 bp, synthetic construct
  source 1..20: mol_type = other DNA
acttgtgttagatataaata

SEQ ID NO: 2601 - DNA, 20 bp, synthetic construct
  source 1..20: mol_type = other DNA
ttcttccattgcaggtaagt

SEQ ID NO: 2602 - DNA, 20 bp, synthetic construct
  source 1..20: mol_type = other DNA
ctcttttccaggtgttctaa

SEQ ID NO: 2603 - DNA, 20 bp, synthetic construct
  source 1..20: mol_type = other DNA
attttcttagctactgccct

SEQ ID NO: 2604 - DNA, 20 bp, synthetic construct
  source 1..20: mol_type = other DNA
taatgttcatttcagttaat

SEQ ID NO: 2605 - DNA, 20 bp, synthetic construct
  source 1..20: mol_type = other DNA
ttttccccacatatcacagg

SEQ ID NO: 2606 - DNA, 20 bp, synthetic construct
  source 1..20: mol_type = other DNA
attcaccaaaggaaaattaa

SEQ ID NO: 2607 - DNA, 20 bp, synthetic construct
  source 1..20: mol_type = other DNA
gaatctttcaccttggtttg

SEQ ID NO: 2608 - DNA, 20 bp, synthetic construct
  source 1..20: mol_type = other DNA
gaacttatcccaaggttgta

SEQ ID NO: 2609 - DNA, 20 bp, synthetic construct
  source 1..20: mol_type = other DNA
ttctatttgtgtctccttga

SEQ ID NO: 2610 - DNA, 20 bp, synthetic construct
  source 1..20: mol_type = other DNA
ttttttacctggaaaatctc

SEQ ID NO: 2611 - DNA, 20 bp, synthetic construct
  source 1..20: mol_type = other DNA
atcaatttaagcaattgtta

SEQ ID NO: 2612 - DNA, 20 bp, synthetic construct
  source 1..20: mol_type = other DNA
tcctctgtgcttattattca

SEQ ID NO: 2613 - DNA, 20 bp, synthetic construct
  source 1..20: mol_type = other DNA
accatgtacagttcaatggt

SEQ ID NO: 2614 - DNA, 20 bp, synthetic construct
  source 1..20: mol_type = other DNA
ctaagatagggcattagtat

SEQ ID NO: 2615 - DNA, 20 bp, synthetic construct
  source 1..20: mol_type = other DNA
aaagaaaggaatgccacata

SEQ ID NO: 2616 - DNA, 20 bp, synthetic construct
  source 1..20: mol_type = other DNA
gattcagtgcacattgtaag

SEQ ID NO: 2617 - DNA, 20 bp, synthetic construct
  source 1..20: mol_type = other DNA
gatatgtacaatctgttgtg

SEQ ID NO: 2618 - DNA, 20 bp, synthetic construct
  source 1..20: mol_type = other DNA
atcaggagctctattaatag

SEQ ID NO: 2619 - DNA, 20 bp, synthetic construct
  source 1..20: mol_type = other DNA
aatcaggagctctattaata

SEQ ID NO: 2620 - DNA, 20 bp, synthetic construct
  source 1..20: mol_type = other DNA
ggctgcccccagtgttccat

SEQ ID NO: 2621 - DNA, 20 bp, synthetic construct
  source 1..20: mol_type = other DNA
cggctgcccccagtgttcca

SEQ ID NO: 2622 - DNA, 20 bp, synthetic construct
  source 1..20: mol_type = other DNA
ggtctactctatgttttcca

SEQ ID NO: 2623 - DNA, 20 bp, synthetic construct
  source 1..20: mol_type = other DNA
atggttatttgctgttatac

SEQ ID NO: 2624 - DNA, 20 bp, synthetic construct
  source 1..20: mol_type = other DNA
atgttgtcgggttttcttaa

SEQ ID NO: 2625 - DNA, 20 bp, synthetic construct
  source 1..20: mol_type = other DNA
agccagaggttcagtgttgt

SEQ ID NO: 2626 - DNA, 20 bp, synthetic construct
  source 1..20: mol_type = other DNA
attcccaaacatttgatttc

SEQ ID NO: 2627 - DNA, 20 bp, synthetic construct
  source 1..20: mol_type = other DNA
ctctcctgtatgtcaaaatc

SEQ ID NO: 2628 - DNA, 20 bp, synthetic construct
  source 1..20: mol_type = other DNA
tatgatgatggtgctttcac

SEQ ID NO: 2629 - DNA, 20 bp, synthetic construct
  source 1..20: mol_type = other DNA
taattctggtttttgacaat

SEQ ID NO: 2630 - DNA, 20 bp, synthetic construct
  source 1..20: mol_type = other DNA
ttttttagattgtctcccta

SEQ ID NO: 2631 - DNA, 20 bp, synthetic construct
  source 1..20: mol_type = other DNA
caaaagggtttcccacatat

SEQ ID NO: 2632 - DNA, 20 bp, synthetic construct
  source 1..20: mol_type = other DNA
ttccactggtgattttttcc

SEQ ID NO: 2633 - DNA, 20 bp, synthetic construct
  source 1..20: mol_type = other DNA
tttccactggtgattttttc

SEQ ID NO: 2634 - DNA, 20 bp, synthetic construct
  source 1..20: mol_type = other DNA
ccttactggttagctttttt

SEQ ID NO: 2635 - DNA, 20 bp, synthetic construct
  source 1..20: mol_type = other DNA
cccttactggttagcttttt

SEQ ID NO: 2636 - DNA, 20 bp, synthetic construct
  source 1..20: mol_type = other DNA
ttcggtgtggaagacttgtg

SEQ ID NO: 2637 - DNA, 20 bp, synthetic construct
  source 1..20: mol_type = other DNA
tttcggtgtggaagacttgt

SEQ ID NO: 2638 - DNA, 20 bp, synthetic construct
  source 1..20: mol_type = other DNA
tcttccattgcaggtaagtt

SEQ ID NO: 2639 - DNA, 20 bp, synthetic construct
  source 1..20: mol_type = other DNA
actgccctggtgttatacat

SEQ ID NO: 2640 - DNA, 20 bp, synthetic construct
  source 1..20: mol_type = other DNA
gttaatgtgtcataattttc

SEQ ID NO: 2641 - DNA, 20 bp, synthetic construct
  source 1..20: mol_type = other DNA
tttttagtggttacataatg

SEQ ID NO: 2642 - DNA, 20 bp, synthetic construct
  source 1..20: mol_type = other DNA
atttttagtggttacataat

SEQ ID NO: 2643 - DNA, 20 bp, synthetic construct
  source 1..20: mol_type = other DNA
ttttacttgtcagtttttcc

SEQ ID NO: 2644 - DNA, 20 bp, synthetic construct
  source 1..20: mol_type = other DNA
tttttacttgtcagtttttc

SEQ ID NO: 2645 - DNA, 20 bp, synthetic construct
  source 1..20: mol_type = other DNA
tttcctttcagatttttcac

SEQ ID NO: 2646 - DNA, 20 bp, synthetic construct
  source 1..20: mol_type = other DNA
actgaattttctctcccagc

SEQ ID NO: 2647 - DNA, 20 bp, synthetic construct
  source 1..20: mol_type = other DNA
cgtccattttctgtgctttt

SEQ ID NO: 2648 - DNA, 20 bp, synthetic construct
  source 1..20: mol_type = other DNA
  modified_base 7: mod_base = OTHER; note = uracil
gtcagtttttccccacatat

SEQ ID NO: 2649 - DNA, 20 bp, synthetic construct
  source 1..20: mol_type = other DNA
ataatgactgcctcggtcgt

SEQ ID NO: 2650 - DNA, 20 bp, synthetic construct
  source 1..20: mol_type = other DNA
ccataatgactgcctcggtc

SEQ ID NO: 2651 - DNA, 20 bp, synthetic construct
  source 1..20: mol_type = other DNA
cataatgactgctctgcaaa

SEQ ID NO: 2652 - DNA, 20 bp, synthetic construct
  source 1..20: mol_type = other DNA
ttcgccataatgactgcctc

SEQ ID NO: 2653 - DNA, 20 bp, synthetic construct
  source 1..20: mol_type = other DNA
ccataatgactgctctgcaa

SEQ ID NO: 2654 - DNA, 20 bp, synthetic construct
  source 1..20: mol_type = other DNA
gttcgccataatgactgcct

SEQ ID NO: 2655 - DNA, 20 bp, synthetic construct
  source 1..20: mol_type = other DNA
attagtgtgatcatgcacat

SEQ ID NO: 2656 - DNA, 20 bp, synthetic construct
  source 1..20: mol_type = other DNA
acagccatgttcagtgtcag

SEQ ID NO: 2657 - DNA, 20 bp, synthetic construct
  source 1..20: mol_type = other DNA
ttgattgtgatattgacgca

SEQ ID NO: 2658 - DNA, 20 bp, synthetic construct
  source 1..20: mol_type = other DNA
catgttttcacgatagtaac

SEQ ID NO: 2659 - DNA, 20 bp, synthetic construct
  source 1..20: mol_type = other DNA
tattcatgttctccacggga

SEQ ID NO: 2660 - DNA, 20 bp, synthetic construct
  source 1..20: mol_type = other DNA
aaaatgtttgtcactggttc

SEQ ID NO: 2661 - DNA, 20 bp, synthetic construct
  source 1..20: mol_type = other DNA
agaagataatcaagggtgca

SEQ ID NO: 2662 - DNA, 20 bp, synthetic construct
  source 1..20: mol_type = other DNA
atcctgatgtcaaagtccca

SEQ ID NO: 2663 - DNA, 20 bp, synthetic construct
  source 1..20: mol_type = other DNA
aggtgctgtccaaggccata

SEQ ID NO: 2664 - DNA, 20 bp, synthetic construct
  source 1..20: mol_type = other DNA
ttagtcttgtcctcagtgct

SEQ ID NO: 2665 - DNA, 20 bp, synthetic construct
  source 1..20: mol_type = other DNA
tggttgctgtactcatccat

SEQ ID NO: 2666 - DNA, 20 bp, synthetic construct
  source 1..20: mol_type = other DNA
gcatgttttcacgatagtaa

SEQ ID NO: 2667 - DNA, 20 bp, synthetic construct
  source 1..20: mol_type = other DNA
aactgtgggtccatttcatc

SEQ ID NO: 2668 - DNA, 20 bp, synthetic construct
  source 1..20: mol_type = other DNA
tgaccatcttattcggtgct

SEQ ID NO: 2669 - DNA, 20 bp, synthetic construct
  source 1..20: mol_type = other DNA
tctatggaatctgtaggtca

SEQ ID NO: 2670 - DNA, 20 bp, synthetic construct
  source 1..20: mol_type = other DNA
caattagtgtgatcatgcac

SEQ ID NO: 2671 - DNA, 20 bp, synthetic construct
  source 1..20: mol_type = other DNA
ttttctgtgacatttggtga

SEQ ID NO: 2672 - DNA, 20 bp, synthetic construct
  source 1..20: mol_type = other DNA
gcttccatcacttctcacct

SEQ ID NO: 2673 - DNA, 20 bp, synthetic construct
  source 1..20: mol_type = other DNA
tttctgtgacatttggtgac

SEQ ID NO: 2674 - DNA, 20 bp, synthetic construct
  source 1..20: mol_type = other DNA
gacagccatgttcagtgtca

SEQ ID NO: 2675 - DNA, 20 bp, synthetic construct
  source 1..20: mol_type = other DNA
ggtttctgggtcacagcttc

SEQ ID NO: 2676 - DNA, 20 bp, synthetic construct
  source 1..20: mol_type = other DNA
aaggtgctgtccaaggccat

SEQ ID NO: 2677 - DNA, 20 bp, synthetic construct
  source 1..20: mol_type = other DNA
ttcctctgtgcttattattc

SEQ ID NO: 2678 - DNA, 20 bp, synthetic construct
  source 1..20: mol_type = other DNA
ggttgttctataaattcatc

SEQ ID NO: 2679 - DNA, 20 bp, synthetic construct
  source 1..20: mol_type = other DNA
acatttatttcatgtgccag

SEQ ID NO: 2680 - DNA, 20 bp, synthetic construct
  source 1..20: mol_type = other DNA
caaggtgctgtccaaggcca

SEQ ID NO: 2681 - DNA, 20 bp, synthetic construct
  source 1..20: mol_type = other DNA
ctgaagttagtcttgtcctc

SEQ ID NO: 2682 - DNA, 20 bp, synthetic construct
  source 1..20: mol_type = other DNA
gttagtcttgtcctcagtgc

SEQ ID NO: 2683 - DNA, 20 bp, synthetic construct
  source 1..20: mol_type = other DNA
ctcaaggtgctgtccaaggc

SEQ ID NO: 2684 - DNA, 20 bp, synthetic construct
  source 1..20: mol_type = other DNA
ttagtgtgatcatgcacata

SEQ ID NO: 2685 - DNA, 20 bp, synthetic construct
  source 1..20: mol_type = other DNA
catttatttcatgtgccagc

SEQ ID NO: 2686 - DNA, 20 bp, synthetic construct
  source 1..20: mol_type = other DNA
aagttagtcttgtcctcagt

SEQ ID NO: 2687 - DNA, 20 bp, synthetic construct
  source 1..20: mol_type = other DNA
ccccacatatcacaggctcc

SEQ ID NO: 2688 - DNA, 20 bp, synthetic construct
  source 1..20: mol_type = other DNA
ctttcctgatagttcactgt

SEQ ID NO: 2689 - DNA, 20 bp, synthetic construct
  source 1..20: mol_type = other DNA
agattcttgttcagcacgat

SEQ ID NO: 2690 - DNA, 20 bp, synthetic construct
  source 1..20: mol_type = other DNA
cggtgcatgttttcacgata

SEQ ID NO: 2691 - DNA, 20 bp, synthetic construct
  source 1..20: mol_type = other DNA
ttgacagccatgttcagtgt

SEQ ID NO: 2692 - DNA, 20 bp, synthetic construct
  source 1..20: mol_type = other DNA
gtgcatgttttcacgatagt

SEQ ID NO: 2693 - DNA, 20 bp, synthetic construct
  source 1..20: mol_type = other DNA
tgcttccatcacttctcacc

SEQ ID NO: 2694 - DNA, 20 bp, synthetic construct
  source 1..20: mol_type = other DNA
tttctagaacttgcaaggaa

SEQ ID NO: 2695 - DNA, 20 bp, synthetic construct
  source 1..20: mol_type = other DNA
cctgatagttcactgttggc

SEQ ID NO: 2696 - DNA, 20 bp, synthetic construct
  source 1..20: mol_type = other DNA
tctatttgtgtctccttgaa

SEQ ID NO: 2697 - DNA, 20 bp, synthetic construct
  source 1..20: mol_type = other DNA
ttcttagctactgccctggt

SEQ ID NO: 2698 - DNA, 20 bp, synthetic construct
  source 1..20: mol_type = other DNA
tttttagattgtctccctat

SEQ ID NO: 2699 - DNA, 20 bp, synthetic construct
  source 1..20: mol_type = other DNA
atttttccaacatgaccatc

SEQ ID NO: 2700 - DNA, 20 bp, synthetic construct
  source 1..20: mol_type = other DNA
cacaactgcagctctcctgt

SEQ ID NO: 2701 - DNA, 20 bp, synthetic construct
  source 1..20: mol_type = other DNA
gctcctcaaactgacaagcc

SEQ ID NO: 2702 - DNA, 20 bp, synthetic construct
  source 1..20: mol_type = other DNA
ttgctcctttccactggtga

SEQ ID NO: 2703 - DNA, 20 bp, synthetic construct
  source 1..20: mol_type = other DNA
gcaccttctccattcgctgc

SEQ ID NO: 2704 - DNA, 20 bp, synthetic construct
  source 1..20: mol_type = other DNA
ggtgcttccatcacttctca

SEQ ID NO: 2705 - DNA, 20 bp, synthetic construct
  source 1..20: mol_type = other DNA
gctcatggcacttcccagca

SEQ ID NO: 2706 - DNA, 20 bp, synthetic construct
  source 1..20: mol_type = other DNA
gccaccttcacccaatttta

SEQ ID NO: 2707 - DNA, 20 bp, synthetic construct
  source 1..20: mol_type = other DNA
gagcctgcatcccaagagct

SEQ ID NO: 2708 - DNA, 20 bp, synthetic construct
  source 1..20: mol_type = other DNA
gggcaccatcccctcagtca

SEQ ID NO: 2709 - DNA, 20 bp, synthetic construct
  source 1..20: mol_type = other DNA
gcttgaccagcatctcaggt

SEQ ID NO: 2710 - DNA, 20 bp, synthetic construct
  source 1..20: mol_type = other DNA
ctgtagccatcactgggtta

SEQ ID NO: 2711 - DNA, 20 bp, synthetic construct
  source 1..20: mol_type = other DNA
ctgacaagcccatcctgtct

SEQ ID NO: 2712 - DNA, 20 bp, synthetic construct
  source 1..20: mol_type = other DNA
tcctcatcccactatcagga

SEQ ID NO: 2713 - DNA, 20 bp, synthetic construct
  source 1..20: mol_type = other DNA
cctccattctatgaatggac

SEQ ID NO: 2714 - DNA, 20 bp, synthetic construct
  source 1..20: mol_type = other DNA
cccccaataactcatacata

SEQ ID NO: 2715 - DNA, 20 bp, synthetic construct
  source 1..20: mol_type = other DNA
cggtgcttccatcacttctc

SEQ ID NO: 2716 - DNA, 20 bp, synthetic construct
  source 1..20: mol_type = other DNA
tctcaggtctactctatgtt

SEQ ID NO: 2717 - DNA, 20 bp, synthetic construct
  source 1..20: mol_type = other DNA
gttcaggcctcccactgctc

SEQ ID NO: 2718 - DNA, 20 bp, synthetic construct
  source 1..20: mol_type = other DNA
ccaagagctaagaatctcta

SEQ ID NO: 2719 - DNA, 20 bp, synthetic construct
  source 1..20: mol_type = other DNA
gtgaacaataatctattgct

SEQ ID NO: 2720 - DNA, 20 bp, synthetic construct
  source 1..20: mol_type = other DNA
ctgtactcatccatgggcct

SEQ ID NO: 2721 - DNA, 20 bp, synthetic construct
  source 1..20: mol_type = other DNA
gtgactttcaaccttcctaa

SEQ ID NO: 2722 - DNA, 20 bp, synthetic construct
  source 1..20: mol_type = other DNA
tcaggtctactctatgtttt

SEQ ID NO: 2723 - DNA, 20 bp, synthetic construct
  source 1..20: mol_type = other DNA
ctcaggtctactctatgttt

SEQ ID NO: 2724 - DNA, 20 bp, synthetic construct
  source 1..20: mol_type = other DNA
ttccagcttcttaatgcatc

SEQ ID NO: 2725 - DNA, 20 bp, synthetic construct
  source 1..20: mol_type = other DNA
ctccttgaatttctttcatc

SEQ ID NO: 2726 - DNA, 20 bp, synthetic construct
  source 1..20: mol_type = other DNA
gcttctcaatttttccaaca

SEQ ID NO: 2727 - DNA, 20 bp, synthetic construct
  source 1..20: mol_type = other DNA
tctttctaattttgtacaca

SEQ ID NO: 2728 - DNA, 20 bp, synthetic construct
  source 1..20: mol_type = other DNA
gttgttctataaattcatct

SEQ ID NO: 2729 - DNA, 20 bp, synthetic construct
  source 1..20: mol_type = other DNA
tccttgaatttctttcatca

SEQ ID NO: 2730 - DNA, 20 bp, synthetic construct
  source 1..20: mol_type = other DNA
ccattttttaattacatcat

SEQ ID NO: 2731 - DNA, 20 bp, synthetic construct
  source 1..20: mol_type = other DNA
tctccttgaatttctttcat

SEQ ID NO: 2732 - DNA, 20 bp, synthetic construct
  source 1..20: mol_type = other DNA
tctgagatttgttttagcct

SEQ ID NO: 2733 - DNA, 20 bp, synthetic construct
  source 1..20: mol_type = other DNA
caattgtttttctctctctc

SEQ ID NO: 2734 - DNA, 20 bp, synthetic construct
  source 1..20: mol_type = other DNA
tctcaattttttgagaagtt

SEQ ID NO: 2735 - DNA, 20 bp, synthetic construct
  source 1..20: mol_type = other DNA
tctcaatttttccaacatga

SEQ ID NO: 2736 - DNA, 20 bp, synthetic construct
  source 1..20: mol_type = other DNA
ccattttctgtgcttttcct

SEQ ID NO: 2737 - DNA, 20 bp, synthetic construct
  source 1..20: mol_type = other DNA
tccattttctgtgcttttcc

SEQ ID NO: 2738 - DNA, 20 bp, synthetic construct
  source 1..20: mol_type = other DNA
gtccattttctgtgcttttc

SEQ ID NO: 2739 - DNA, 20 bp, synthetic construct
  source 1..20: mol_type = other DNA
acgtccattttctgtgcttt

SEQ ID NO: 2740 - DNA, 20 bp, synthetic construct
  source 1..20: mol_type = other DNA
aacgtccattttctgtgctt

SEQ ID NO: 2741 - DNA, 20 bp, synthetic construct
  source 1..20: mol_type = other DNA
aaacgtccattttctgtgct

SEQ ID NO: 2742 - DNA, 20 bp, synthetic construct
  source 1..20: mol_type = other DNA
  modified_base 8: mod_base = OTHER; note = uracil
ggttacataatgttcatttc

SEQ ID NO: 2743 - DNA, 20 bp, synthetic construct
  source 1..20: mol_type = other DNA
  modified_base 8: mod_base = OTHER; note = uracil
tggcactttctttttatttc

SEQ ID NO: 2744 - DNA, 20 bp, synthetic construct
  source 1..20: mol_type = other DNA
  modified_base 7: mod_base = OTHER; note = uracil
cgtccattttctgtgctttt

SEQ ID NO: 2745 - DNA, 19 bp, synthetic construct
  source 1..19: mol_type = other DNA
gtcagtttttccccacata

SEQ ID NO: 2746 - DNA, 19 bp, synthetic construct
  source 1..19: mol_type = other DNA
ctctatgttttccagtgcc

SEQ ID NO: 2747 - DNA, 19 bp, synthetic construct
  source 1..19: mol_type = other DNA
gcacactgaccatttttta

SEQ ID NO: 2748 - DNA, 19 bp, synthetic construct
  source 1..19: mol_type = other DNA
actctatgttttccagtgc

SEQ ID NO: 2749 - DNA, 19 bp, synthetic construct
  source 1..19: mol_type = other DNA
tgtcagtttttccccacat

SEQ ID NO: 2750 - DNA, 19 bp, synthetic construct
  source 1..19: mol_type = other DNA
gtcataattttcttagcta

SEQ ID NO: 2751 - DNA, 19 bp, synthetic construct
  source 1..19: mol_type = other DNA
ctatgttttccagtgccca

SEQ ID NO: 2752 - DNA, 19 bp, synthetic construct
  source 1..19: mol_type = other DNA
tctatgttttccagtgccc

SEQ ID NO: 2753 - DNA, 19 bp, synthetic construct
  source 1..19: mol_type = other DNA
ctgaattttctctcccagc

SEQ ID NO: 2754 - DNA, 19 bp, synthetic construct
  source 1..19: mol_type = other DNA
ccacatatagggtccttta

SEQ ID NO: 2755 - DNA, 19 bp, synthetic construct
  source 1..19: mol_type = other DNA
gccacatatagggtccttt

SEQ ID NO: 2756 - DNA, 19 bp, synthetic construct
  source 1..19: mol_type = other DNA
actgaattttctctcccag

SEQ ID NO: 2757 - DNA, 19 bp, synthetic construct
  source 1..19: mol_type = other DNA
cttattattcatgttctcc

SEQ ID NO: 2758 - DNA, 19 bp, synthetic construct
  source 1..19: mol_type = other DNA
cttactcggcttgttccac

SEQ ID NO: 2759 - DNA, 19 bp, synthetic construct
  source 1..19: mol_type = other DNA
tgtcataattttcttagct

SEQ ID NO: 2760 - DNA, 19 bp, synthetic construct
  source 1..19: mol_type = other DNA
tcataattttcttagctac

SEQ ID NO: 2761 - DNA, 19 bp, synthetic construct
  source 1..19: mol_type = other DNA
cacactgaccattttttaa

SEQ ID NO: 2762 - DNA, 19 bp, synthetic construct
  source 1..19: mol_type = other DNA
tcagtttttccccacatat

SEQ ID NO: 2763 - DNA, 19 bp, synthetic construct
  source 1..19: mol_type = other DNA
tatgttttccagtgcccat

SEQ ID NO: 2764 - DNA, 19 bp, synthetic construct
  source 1..19: mol_type = other DNA
gtgtcataattttcttagc

SEQ ID NO: 2765 - DNA, 19 bp, synthetic construct
  source 1..19: mol_type = other DNA
gcttattattcatgttctc

SEQ ID NO: 2766 - DNA, 19 bp, synthetic construct
  source 1..19: mol_type = other DNA
gcttactcggcttgttcca

SEQ ID NO: 2767 - DNA, 18 bp, synthetic construct
  source 1..18: mol_type = other DNA
cagtttttccccacatat

SEQ ID NO: 2768 - DNA, 18 bp, synthetic construct
  source 1..18: mol_type = other DNA
ctatgttttccagtgccc

SEQ ID NO: 2769 - DNA, 18 bp, synthetic construct
  source 1..18: mol_type = other DNA
gtcagtttttccccacat

SEQ ID NO: 2770 - DNA, 18 bp, synthetic construct
  source 1..18: mol_type = other DNA
tcagtttttccccacata

SEQ ID NO: 2771 - DNA, 18 bp, synthetic construct
  source 1..18: mol_type = other DNA
ccacatatagggtccttt

SEQ ID NO: 2772 - DNA, 18 bp, synthetic construct
  source 1..18: mol_type = other DNA
cacatatagggtccttta

SEQ ID NO: 2773 - DNA, 18 bp, synthetic construct
  source 1..18: mol_type = other DNA
actgaattttctctccca

SEQ ID NO: 2774 - DNA, 18 bp, synthetic construct
  source 1..18: mol_type = other DNA
tgaattttctctcccagc

SEQ ID NO: 2775 - DNA, 18 bp, synthetic construct
  source 1..18: mol_type = other DNA
ctgaattttctctcccag

SEQ ID NO: 2776 - DNA, 18 bp, synthetic construct
  source 1..18: mol_type = other DNA
gccacatatagggtcctt

SEQ ID NO: 2777 - DNA, 18 bp, synthetic construct
  source 1..18: mol_type = other DNA
actctatgttttccagtg

SEQ ID NO: 2778 - DNA, 18 bp, synthetic construct
  source 1..18: mol_type = other DNA
tctatgttttccagtgcc

SEQ ID NO: 2779 - DNA, 18 bp, synthetic construct
  source 1..18: mol_type = other DNA
ctctatgttttccagtgc

SEQ ID NO: 2780 - DNA, 18 bp, synthetic construct
  source 1..18: mol_type = other DNA
  modified_base 7: mod_base = OTHER; note = uracil
ctatgttttccagtgccc

SEQ ID NO: 2781 - DNA, 17 bp, synthetic construct
  source 1..17: mol_type = other DNA
actctatgttttccagt

SEQ ID NO: 2782 - DNA, 17 bp, synthetic construct
  source 1..17: mol_type = other DNA
tctatgttttccagtgc

SEQ ID NO: 2783 - DNA, 17 bp, synthetic construct
  source 1..17: mol_type = other DNA
ctctatgttttccagtg

SEQ ID NO: 2784 - DNA, 17 bp, synthetic construct
  source 1..17: mol_type = other DNA
acatatagggtccttta

SEQ ID NO: 2785 - DNA, 17 bp, synthetic construct
  source 1..17: mol_type = other DNA
gccacatatagggtcct

SEQ ID NO: 2786 - DNA, 17 bp, synthetic construct
  source 1..17: mol_type = other DNA
cacatatagggtccttt

SEQ ID NO: 2787 - DNA, 17 bp, synthetic construct
  source 1..17: mol_type = other DNA
ccacatatagggtcctt

SEQ ID NO: 2788 - DNA, 17 bp, synthetic construct
  source 1..17: mol_type = other DNA
ataattttcttagctac

SEQ ID NO: 2789 - DNA, 17 bp, synthetic construct
  source 1..17: mol_type = other DNA
gtcataattttcttagc

SEQ ID NO: 2790 - DNA, 17 bp, synthetic construct
  source 1..17: mol_type = other DNA
cataattttcttagcta

SEQ ID NO: 2791 - DNA, 17 bp, synthetic construct
  source 1..17: mol_type = other DNA
tcataattttcttagct

SEQ ID NO: 2792 - DNA, 17 bp, synthetic construct
  source 1..17: mol_type = other DNA
gtgtcataattttctta

SEQ ID NO: 2793 - DNA, 17 bp, synthetic construct
  source 1..17: mol_type = other DNA
tgtcataattttcttag

SEQ ID NO: 2794 - DNA, 17 bp, synthetic construct
  source 1..17: mol_type = other DNA
tattattcatgttctcc

SEQ ID NO: 2795 - DNA, 17 bp, synthetic construct
  source 1..17: mol_type = other DNA
gcttattattcatgttc

SEQ ID NO: 2796 - DNA, 17 bp, synthetic construct
  source 1..17: mol_type = other DNA
ttattattcatgttctc

SEQ ID NO: 2797 - DNA, 17 bp, synthetic construct
  source 1..17: mol_type = other DNA
cttattattcatgttct

SEQ ID NO: 2798 - DNA, 17 bp, synthetic construct
  source 1..17: mol_type = other DNA
ccattttctgtgctttt

SEQ ID NO: 2799 - DNA, 17 bp, synthetic construct
  source 1..17: mol_type = other DNA
cgtccattttctgtgct

SEQ ID NO: 2800 - DNA, 17 bp, synthetic construct
  source 1..17: mol_type = other DNA
tccattttctgtgcttt

SEQ ID NO: 2801 - DNA, 17 bp, synthetic construct
  source 1..17: mol_type = other DNA
gtccattttctgtgctt

SEQ ID NO: 2802 - DNA, 17 bp, synthetic construct
  source 1..17: mol_type = other DNA
ctatgttttccagtgcc

SEQ ID NO: 2803 - DNA, 16 bp, synthetic construct
  source 1..16: mol_type = other DNA
gtcataattttcttag

SEQ ID NO: 2804 - DNA, 16 bp, synthetic construct
  source 1..16: mol_type = other DNA
cataattttcttagct

SEQ ID NO: 2805 - DNA, 16 bp, synthetic construct
  source 1..16: mol_type = other DNA
tcataattttcttagc

SEQ ID NO: 2806 - DNA, 16 bp, synthetic construct
  source 1..16: mol_type = other DNA
ataattttcttagcta

SEQ ID NO: 2807 - DNA, 19 bp, synthetic construct
  source 1..19: mol_type = other DNA
  modified_base 1: mod_base = OTHER; note = 2'-O-methoxyethyl guanosine 3'-phosphorothioate
  modified_base 2: mod_base = OTHER; note = 2'-O-methoxyethyl thymidine 3'-phosphodiester
  modified_base 3: mod_base = OTHER; note = 2'-O-methoxyethyl 5-methylcytidine 3'-phosphodiester
  modified_base 4: mod_base = OTHER; note = 2'-O-methoxyethyl adenosine 3'-phosphodiester
  modified_base 5: mod_base = OTHER; note = 2'-O-methoxyethyl thymidine 3'-phosphodiester
  modified_base 6..7: mod_base = OTHER; note = 2'-deoxyadenosine 3'-phosphorothioate
  modified_base 8..11: mod_base = OTHER; note = 2'-deoxythymidine 3'-phosphorothioate
  modified_base 12: mod_base = OTHER; note = 5-methyl-2'-deoxycytidine 3'-phosphorothioate
  modified_base 13..14: mod_base = OTHER; note = 2'-deoxythymidine 3'-phosphorothioate
  modified_base 15: mod_base = OTHER; note = 2'-O-methoxyethyl adenosine 3'-phosphorothioate
  modified_base 16: mod_base = OTHER; note = 2'-O-methoxyethyl guanosine 3'-phosphodiester
  modified_base 17: mod_base = OTHER; note = 2'-O-methoxyethyl 5-methylcytidine 3'-phosphodiester
  modified_base 18: mod_base = OTHER; note = 2'-O-methoxyethyl thymidine 3'-phosphorothioate
  modified_base 19: mod_base = OTHER; note = 2'-O-methoxyethyl adenosine
gtcataattttcttagcta

SEQ ID NO: 2808 - DNA, 20 bp, synthetic construct
  source 1..20: mol_type = other DNA
  modified_base 1: mod_base = OTHER; note = 2'-O-methoxyethyl guanosine 3'-phosphorothioate
  modified_base 2: mod_base = OTHER; note = 2'-O-methoxyethyl thymidine 3'-phosphodiester
  modified_base 3: mod_base = OTHER; note = 2'-O-methoxyethyl 5-methylcytidine 3'-phosphodiester
  modified_base 4: mod_base = OTHER; note = 2'-O-methoxyethyl adenosine 3'-phosphodiester
  modified_base 5: mod_base = OTHER; note = 2'-O-methoxyethyl thymidine 3'-phosphorothioate
  modified_base 6..7: mod_base = OTHER; note = 2'-deoxyadenosine 3'-phosphorothioate
  modified_base 8..11: mod_base = OTHER; note = 2'-deoxythymidine 3'-phosphorothioate
  modified_base 12: mod_base = OTHER; note = 5-methyl-2'-deoxycytidine 3'-phosphorothioate
  modified_base 13..14: mod_base = OTHER; note = 2'-deoxythymidine 3'-phosphorothioate
  modified_base 15: mod_base = OTHER; note = 2'-deoxyadenosine 3'-phosphorothioate
  modified_base 16: mod_base = OTHER; note = 2'-O-methoxyethyl guanosine 3'-phosphodiester
  modified_base 17: mod_base = OTHER; note = 2'-O-methoxyethyl 5-methylcytidine 3'-phosphodiester
  modified_base 18: mod_base = OTHER; note = 2'-O-methoxyethyl thymidine 3'-phosphorothioate
  modified_base 19: mod_base = OTHER; note = 2'-O-methoxyethyl adenosine 3'-phosphorothioate
  modified_base 20: mod_base = OTHER; note = 2'-O-methoxyethyl 5-methylcytidine
gtcataattttcttagctac

SEQ ID NO: 2809 - DNA, 20 bp, synthetic construct
  source 1..20: mol_type = other DNA
  modified_base 1: mod_base = OTHER; note = 2'-O-methoxyethyl guanosine 3'-phosphorothioate
  modified_base 2: mod_base = OTHER; note = 2'-O-methoxyethyl thymidine 3'-phosphodiester
  modified_base 3: mod_base = OTHER; note = 2'-O-methoxyethyl 5-methylcytidine 3'-phosphodiester
  modified_base 4: mod_base = OTHER; note = 2'-O-methoxyethyl adenosine 3'-phosphodiester
  modified_base 5: mod_base = OTHER; note = 2'-O-methoxyethyl thymidine 3'-phosphodiester
  modified_base 6: mod_base = OTHER; note = 2'-O-methoxyethyl adenosine 3'-phosphodiester
  modified_base 7: mod_base = OTHER; note = 2'-deoxyadenosine 3'-phosphorothioate
  modified_base 8..11: mod_base = OTHER; note = 2'-deoxythymidine 3'-phosphorothioate
  modified_base 12: mod_base = OTHER; note = 5-methyl-2'-deoxycytidine 3'-phosphorothioate
  modified_base 13..14: mod_base = OTHER; note = 2'-deoxythymidine 3'-phosphorothioate
  modified_base 15: mod_base = OTHER; note = 2'-deoxyadenosine 3'-phosphorothioate
  modified_base 16: mod_base = OTHER; note = 2'-deoxyguanosine 3'-phosphorothioate
  modified_base 17: mod_base = OTHER; note = 2'-O-methoxyethyl 5-methylcytidine 3'-phosphodiester
  modified_base 18: mod_base = OTHER; note = 2'-O-methoxyethyl thymidine 3'-phosphorothioate
  modified_base 19: mod_base = OTHER; note = 2'-O-methoxyethyl adenosine 3'-phosphorothioate
gtcataattttcttagctac

SEQ ID NO: 2810 - DNA, 20 bp, synthetic construct
  source 1..20: mol_type = other DNA
  modified_base 1: mod_base = OTHER; note = 2'-O-methoxyethyl guanosine 3'-phosphorothioate
  modified_base 2: mod_base = OTHER; note = 2'-O-methoxyethyl 5-methylcytidine 3'-phosphodiester
  modified_base 3..4: mod_base = OTHER; note = 2'-O-methoxyethyl thymidine 3'-phosphodiester
  modified_base 5: mod_base = OTHER; note = 2'-O-methoxyethyl adenosine 3'-phosphodiester
  modified_base 6: mod_base = OTHER; note = 2'-O-methoxyethyl thymidine 3'-phosphodiester
  modified_base 7: mod_base = OTHER; note = 2'-deoxythymidine 3'-phosphorothioate
  modified_base 8: mod_base = OTHER; note = 2'-deoxyadenosine 3'-phosphorothioate
  modified_base 9..10: mod_base = OTHER; note = 2'-deoxythymidine 3'-phosphorothioate
  modified_base 11: mod_base = OTHER; note = 5-methyl-2'-deoxycytidine 3'-phosphorothioate
  modified_base 12: mod_base = OTHER; note = 2'-deoxyadenosine 3'-phosphorothioate
  modified_base 13: mod_base = OTHER; note = 2'-deoxythymidine 3'-phosphorothioate
  modified_base 14: mod_base = OTHER; note = 2'-deoxyguanosine 3'-phosphorothioate
  modified_base 15..16: mod_base = OTHER; note = 2'-deoxythymidine 3'-phosphorothioate
  modified_base 17: mod_base = OTHER; note = 2'-O-methoxyethyl 5-methylcytidine 3'-phosphodiester
  modified_base 18: mod_base = OTHER; note = 2'-O-methoxyethyl thymidine 3'-phosphorothioate
  modified_base 19: mod_base = OTHER; note = 2'-O-methoxyethyl 5-methylcytidine 3'-phosphorothioate
  modified_base 20: mod_base = OTHER; note = 2'-O-methoxyethyl 5-methylcytidine
gcttattattcatgttctcc

SEQ ID NO: 2811 - DNA, 20 bp, synthetic construct
  source 1..20: mol_type = other DNA
  modified_base 1: mod_base = OTHER; note = 2'-O-methoxyethyl guanosine 3'-phosphorothioate
  modified_base 2: mod_base = OTHER; note = 2'-O-methoxyethyl thymidine 3'-phosphodiester
  modified_base 3: mod_base = OTHER; note = 2'-O-methoxyethyl guanosine 3'-phosphodiester
  modified_base 4: mod_base = OTHER; note = 2'-O-methoxyethyl thymidine 3'-phosphodiester
  modified_base 5: mod_base = OTHER; note = 2'-O-methoxyethyl 5-methylcytidine 3'-phosphodiester
  modified_base 6: mod_base = OTHER; note = 2'-O-methoxyethyl adenosine 3'-phosphodiester
  modified_base 7: mod_base = OTHER; note = 2'-deoxythymidine 3'-phosphorothioate
  modified_base 8..9: mod_base = OTHER; note = 2'-deoxyadenosine 3'-phosphorothioate
  modified_base 10..13: mod_base = OTHER; note = 2'-deoxythymidine 3'-phosphorothioate
  modified_base 14: mod_base = OTHER; note = 5-methyl-2'-deoxycytidine 3'-phosphorothioate
  modified_base 15..16: mod_base = OTHER; note = 2'-deoxythymidine 3'-phosphorothioate
  modified_base 17: mod_base = OTHER; note = 2'-O-methoxyethyl adenosine 3'-phosphodiester
  modified_base 18: mod_base = OTHER; note = 2'-O-methoxyethyl guanosine 3'-phosphorothioate
  modified_base 19: mod_base = OTHER; note = 2'-O-methoxyethyl 5-methylcytidine 3'-phosphorothioate
  modified_base 20: mod_base = OTHER; note = 2'-O-methoxyethyl thymidine
gtgtcataattttcttagct

SEQ ID NO: 2812 - DNA, 20 bp, synthetic construct
  source 1..20: mol_type = other DNA
  modified_base 1: mod_base = OTHER; note = 2'-O-methoxyethyl adenosine 3'-phosphorothioate
  modified_base 2: mod_base = OTHER; note = 2'-O-methoxyethyl 5-methylcytidine 3'-phosphodiester
  modified_base 3: mod_base = OTHER; note = 2'-O-methoxyethyl guanosine 3'-phosphodiester
  modified_base 4: mod_base = OTHER; note = 2'-O-methoxyethyl thymidine 3'-phosphodiester
  modified_base 5: mod_base = OTHER; note = 2'-O-methoxyethyl 5-methylcytidine 3'-phosphorothioate
  modified_base 6: mod_base = OTHER; note = 5-methyl-2'-deoxycytidine 3'-phosphorothioate
  modified_base 7: mod_base = OTHER; note = 2'-deoxyadenosine 3'-phosphorothioate
  modified_base 8..11: mod_base = OTHER; note = 2'-deoxythymidine 3'-phosphorothioate
  modified_base 12: mod_base = OTHER; note = 5-methyl-2'-deoxycytidine 3'-phosphorothioate
  modified_base 13: mod_base = OTHER; note = 2'-deoxythymidine 3'-phosphorothioate
  modified_base 14: mod_base = OTHER; note = 2'-deoxyguanosine 3'-phosphorothioate
  modified_base 15: mod_base = OTHER; note = 2'-deoxythymidine 3'-phosphorothioate
  modified_base 16: mod_base = OTHER; note = 2'-O-methoxyethyl guanosine 3'-phosphodiester
  modified_base 17: mod_base = OTHER; note = 2'-O-methoxyethyl 5-methylcytidine 3'-phosphodiester
  modified_base 18..19: mod_base = OTHER; note = 2'-O-methoxyethyl thymidine 3'-phosphorothioate
  modified_base 20: mod_base = OTHER; note = 2'-O-methoxyethyl thymidine
acgtccattttctgtgcttt

1.-87. (canceled)

88. A modified oligonucleotide according to the following chemical structure: [chemical structure]
or a salt thereof.

89. A modified oligonucleotide according to the following chemical structure:

[chemical structure]

90.-97. (canceled)

98. The modified oligonucleotide of claim 88 which is the sodium salt or the potassium salt.

99. (canceled)

100. A compound comprising a modified oligonucleotide according to the following chemical notation: Ges Teo ^{m}Ceo Aeo Teo Aeo Ads Tds Tds Tds Tds ^{m}Cds Tds Tds Ads Gds ^{m}Ceo Tes Aes ^{m}Ce (SEQ ID NO: 2809), wherein,
A=an adenine nucleobase,
^{m}C=a 5-methyl cytosine nucleobase,
G=a guanine nucleobase,
T=a thymine nucleobase,
e=a 2′-MOE modified sugar,
d=a 2′-β-D deoxyribosyl sugar,
s=a phosphorothioate internucleoside linkage, and
o=a phosphodiester internucleoside linkage.

101.-111. (canceled)

112. A population of modified oligonucleotides of claim 88, wherein all of the phosphorothioate internucleoside linkages of the modified oligonucleotide are stereorandom.

113. A pharmaceutical composition comprising the population of modified oligonucleotides of claim 112 and a pharmaceutically acceptable carrier or diluent.

114. A pharmaceutical composition comprising the modified oligonucleotide of claim 88, and a pharmaceutically acceptable diluent or carrier.

115. The pharmaceutical composition of claim 114, wherein the pharmaceutically acceptable diluent is phosphate-buffered saline or artificial cerebrospinal fluid.

116. The pharmaceutical composition of claim 115, wherein the pharmaceutical composition consists essentially of the modified oligonucleotide and artificial cerebrospinal fluid.

117. The pharmaceutical composition of claim 115, wherein the pharmaceutical composition consists essentially of the modified oligonucleotide and phosphate-buffered saline.

118. A population of modified oligonucleotides of claim 89, wherein all of the phosphorothioate internucleoside linkages of the modified oligonucleotide are stereorandom.

119. A population of modified oligonucleotides of claim 98, wherein all of the phosphorothioate internucleoside linkages of the modified oligonucleotide are stereorandom.

120. A population of compounds of claim 100, wherein all of the phosphorothioate internucleoside linkages of the modified oligonucleotide are stereorandom.

121. A pharmaceutical composition comprising the modified oligonucleotide of claim 89, and a pharmaceutically acceptable diluent or carrier.

122. The pharmaceutical composition of claim 121, wherein the pharmaceutically acceptable diluent is phosphate-buffered saline or artificial cerebrospinal fluid.

123. The pharmaceutical composition of claim 122, wherein the pharmaceutical composition consists essentially of the modified oligonucleotide and artificial cerebrospinal fluid.

124. The pharmaceutical composition of claim 122, wherein the pharmaceutical composition consists essentially of the modified oligonucleotide and phosphate-buffered saline.

125. A pharmaceutical composition comprising the modified oligonucleotide of claim 98, and a pharmaceutically acceptable diluent or carrier.

126. The pharmaceutical composition of claim 125, wherein the pharmaceutically acceptable diluent is phosphate-buffered saline or artificial cerebrospinal fluid.

127. The pharmaceutical composition of claim 126, wherein the pharmaceutical composition consists essentially of the modified oligonucleotide and artificial cerebrospinal fluid.

128. The pharmaceutical composition of claim 126, wherein the pharmaceutical composition consists essentially of the modified oligonucleotide and phosphate-buffered saline.

129. A pharmaceutical composition comprising the compound of claim 100, and a pharmaceutically acceptable diluent or carrier.

130. The pharmaceutical composition of claim 129, wherein the pharmaceutically acceptable diluent is phosphate-buffered saline or artificial cerebrospinal fluid.

131. The pharmaceutical composition of claim 130, wherein the pharmaceutical composition consists essentially of the compound and artificial cerebrospinal fluid.

132. The pharmaceutical composition of claim 130, wherein the pharmaceutical composition consists essentially of the compound and phosphate-buffered saline.

133. The pharmaceutical composition of claim 113, wherein the pharmaceutically acceptable diluent is phosphate-buffered saline or artificial cerebrospinal fluid.

134. A pharmaceutical composition comprising the population of modified oligonucleotides of claim 118, and a pharmaceutically acceptable diluent or carrier.

135. The pharmaceutical composition of claim 134, wherein the pharmaceutically acceptable diluent is phosphate-buffered saline or artificial cerebrospinal fluid.

136. A pharmaceutical composition comprising the population of modified oligonucleotides of claim 119, and a pharmaceutically acceptable diluent or carrier.

137. The pharmaceutical composition of claim 136, wherein the pharmaceutically acceptable diluent is phosphate-buffered saline or artificial cerebrospinal fluid.

138. A pharmaceutical composition comprising the population of compounds of claim 120, and a pharmaceutically acceptable diluent or carrier.

139. The pharmaceutical composition of claim 139, wherein the pharmaceutically acceptable diluent is phosphate-buffered saline or artificial cerebrospinal fluid.
